United States Patent Application Publication US 2025/0320452 A1 - sequence listing, part 3

SEQ ID NO: 4 - DNA, 3979097 bp, synthetic construct (residues 1-1,989,549 of 3,979,097)
  source 1..3979097: mol_type = other DNA; note = Synthetic E.coli genome
agcttttcattctgactgcaacgggcaatatgtctctgtgtggattaaaaaaagagtgtctgatagcagcttctgaactggttacctgccgtgagtaaattaaaattttattgacttaggtcactaaatactttaaccaatataggcatagcgcacagacagataaaaattacagagtacacaacatccatgaaacgcattagcaccaccattaccaccaccatcaccattaccacaggtaacggtgcgggctgacgcgtacaggaaacacagaaaaaagcccgcacctgacagtgcgggctttttttttcgaccaaaggtaacgaggtaacaaccatgcgagtgttgaagttcggcggtacaagtgtggcaaatgcagaacgttttctgcgtgttgccgatattctggaaagcaatgccaggcaggggcaggtggccaccgtcctctctgcccccgccaaaatcaccaaccacctggtggcgatgattgaaaaaaccattagcggccaggatgctttacccaatatcagcgatgccgaacgtatttttgccgaacttttgacgggactcgccgccgcccagccggggttcccgctggcgcaattgaaaactttcgtcgatcaggaatttgcccaaataaaacatgtcctgcatggcattagtttgttggggcagtgcccggatagcatcaacgctgcgctgatttgccgtggcgagaaaatgagcatcgccattatggccggcgtattagaagcgcgcggtcacaacgttactgttatcgatccggtcgaaaaactgctggcagtggggcattacctcgaatctaccgtcgatattgctgagtccacccgccgtattgcggcaagccgcattccggctgatcacatggtgctgatggcaggtttcaccgccggtaatgaaaaaggcgaactggtggtgcttggacgcaacggttccgactactctgctgcggtgctggctgcctgtttacgcgccgattgttgcgagatttggacggacgttgacggggtctatacctgcgacccgcgtcaggtgcccgatgcgaggttgttgaagagcatgtcctaccaggaagcgatggagctttcctacttcggcgctaaagttcttcacccccgcaccattacccccatcgcccagttccagatcccttgcctgattaaaaataccggaaatcctcaagcaccaggtacgctcattggtgccagccgtgatgaagacgaattaccggtcaagggcatttccaatctgaataacatggcaatgttcagcgtttctggtccggggatgaaagggatggtcggcatggcggcgcgcgtctttgcagcgatgagtcgcgcccgtatttccgtggtgctgattacgcaaagttcttccgaatacagcatcagtttctgcgttccacaaagcgactgtgtgcgagctgaacgggcaatgcaggaagagttctacctggaactgaaagaaggcttactggagccgctggcagtgacggaacggctggccattatcagcgtggtaggtgatggtatgcgcaccttgcgtgggatcagcgcgaaattctttgccgcactggcccgcgccaatatcaacattgtcgccattgctcagggatcttctgaacgcagtatctctgtcgtggtaaataacgatgatgcgaccactggcgtgcgcgttactcatcagatgctgttcaataccgatcaggttatcgaagtgtttgtgattggcgtcggtggcgttggcggtgcgctgctggagcaactgaagcgtcagcaaagctggctgaagaataaacatatcgacttacgtgtctgcggtgttgccaacagcaaggctctgctcaccaatgtacatggccttaatctggaaaactggcaggaagaactggcgcaagccaaagagccgtttaatctcgggcgcttaattcgcctcgtgaaagaatatcatctgctgaacccggtcattgttgactgcacttccagccaggcagtggcggatcaatatgccgacttcctgcgcgaaggtttccacgttgtcacgccgaacaaaaaggccaacaccagcagcatggattactaccatcagttgcgttatgcggcggaaaaaagccggcgtaaattcctctatgacaccaacgttggggctggattaccggttattgagaacctgcaaaatctgctcaatgcaggtgatgaattgatgaagttctccggcattctttctggtagcctttcttatatcttcggcaagttagacgaaggcatgagtttctccgaggcgaccacgctggcgcgggaaatgggttataccgaaccggacccgcgagatgatctttctggtatggatgtggcgcgtaaactattgattctcgctcgtgaaacgggacgtgaactggagctggcggatattgaaattgaacctgtgctgcccgcagagtttaacgccgagggtgatgttgccgcttttatggcgaatctgagtcaactcgacgatctctttgccgcgcgcgtggcgaaggcccgtgatgaaggaaaagttttgcgctatgttggcaatattgatgaagatggcgtctgccgcgtgaagattgccgaagtggatggtaatgatccgctgttcaaagtgaaaaatggcgaaaacgccctggccttctatagccactattatcagccgctgccgttggtactgcgcggatatggtgcgggcaatgacgttacagctgccggtgtctttgctgatctgctacgtaccctcagttggaagttaggagtctgacatggttaaagtttatgccccggcttccagtgccaatatgagcgtcgggtttgatgtgctcggggcggcggtgacacctgttgatggtgcattgctcggagatgtagtcacggttgaggcggcagagacattcagtctcaacaacctcggacgctttgccgataagctgccgagtgaaccacgggaaaatatcgtttatcagtgctgggagcgtttttgccaggaactgggtaagcaaattccagtggcgatgaccctggaaaagaatatgccgatcggtagcggcttaggctccagtgcctgtagcgtggtcgcggcgctgatggcgatgaatgaacactgcggcaagccgcttaatgacactcgtttgctggctttgatgggcgagctggaaggccgtatctccggcagcattcattacgacaacgtggcaccgtgttttctcggtggtatgcagttgatgatcgaagaaaacgacatcatcagccagcaagtgccagggtttgatgagtggctgtgggtgctggcgtatccggggattaaagtcagcacggcagaagccagggctattttaccggcgcagtatcgccgccaggattgcattgcgcacgggcgacatctggcaggcttcattcacgcctgctattcccgtcagcctgagcttgccgcgaagctgatgaaagatgttatcgctgaaccctaccgtgaacggttactgccaggcttccggcaggcgcggcaggcggtcgcggaaatcggcgcggtagcgagcggtatctccggctccggcccgaccttgttcgctctgtgtgacaagccggaaaccgcccagcgcgttgccgactggttgggtaagaactacctgcaaaatcaggaaggttttgttcatatttgccggctggatacggcgggcgcacgagtactggaaaactaaatgaaactctacaatctgaaagatcacaacgagcaggtcagctttgcgcaagccgtaacccaggggttgggcaaaaatcaggggctgttttttccgcacgacctgccggaattcagcctgactgaaattgatgagatgctgaagctggattttgtcacccgcagtgcgaagatcctcagcgcgtttattggtgatgaaatcccacaggaaatcctggaagagcgcgtgcgcgcggcgtttgccttcccggctccggtcgccaatgttgaaagcgatgtcggttgtctggaattgttccacgggccaacgctggcatttaaagatttcggcggtcgctttatggcacaaatgctgacccatattgcgggtgataagccagtgaccattctgaccgcgacctccggtgataccggagcggcagtggctcatgctttctacggtttaccgaatgtgaaagtggttatcctctatccacgaggcaaaatcagtccactgcaagaaaaactgttctgtacattgggcggcaatatcgaaactgttgccatcgacggcgatttcgatgcctgtcaggcgctggtgaagcaggcgtttgatgatgaagaactgaaagtggcgctagggttaaacagcgctaacagcattaacatcagccgtttgctggcgcagatttgctactactttgaagctgttgcgcagctgccgcaggagacgcgcaaccagctggttgtcagcgtgccaagcggaaacttcggcgatttgacggcgggtctgctggcgaagagtctcggtctgccggtgaaacgttttattgctgcgaccaacgtgaacgataccgtgccacgtttcctgcacgacggtcagtggagtcccaaagcgactcaggcgacgttatccaacgcgatggacgtgagtcagccgaacaactggccgcgtgtggaagagttgttccgccgcaaaatctggcaactgaaagagctgggttatgcagccgtggatgatgaaaccacgcaacagacaatgcgtgagttaaaagaactgggctacactagcgagccgcacgctgccgtagcttatcgtgcgctgcgtgatcagttgaatccaggcgaatatggcttgttcctcggcaccgcgcatccggcgaaatttaaagagagcgtggaagcgattctcggtgaaacgttggatctgccaaaagagctggcagaacgtgctgatttacccttgcttagtcataatctgcccgccgattttgctgcgttgcgtaaattgatgatgaatcatcagtaaaatctattcattatctcaatcaggccgggtttgcttttatgcagcccggcttttttatgaagaaattatggagaaaaatgacagggaaaaaggagaaattctcaataaatgcggtaacttagagattaggattgcggagaataacaaccgccgttctcatcgagtaatctccggatatcgacccataacgggcaatgataaaaggagtaacctgtgaaaaagatgcaatctatcgtactcgcactttccctggttctggtcgctcccatggcagcacaggctgcggaaattacgttagtcccgagtgtaaaattacagataggcgatcgtgataatcgtggctattactgggatggaggtcactggcgcgaccacggctggtggaaacaacattatgaatggcgaggcaatcgctggcacctacacggaccgccgccaccgccgcgccaccataagaaagctcctcatgatcatcacggcggtcatggtccaggcaaacatcaccgctaaatgacaaatgccgggtaacaatccggcattcagcgcctgatgcgacgctggcgcgtcttatcaggcctacgttaattctgcaatatattgaatctgcatgcttttgtaggcaggataaggcgttcacgccgcatccggcattgactgcaaacttaacgctgctcgtagcgtttaaacaccagttcgccattgctggaggaatcttcatcaaagaagtaaccttcgctattaaaaccagtcagttgctctggtttggtcagccgattttcaataatgaaacgactcatcagaccgcgtgctttcttagcgtagaagctgatgatcttaaatttgccgttcttctcatcgaggaacaccggcttgataatctcggcattcaatttcttcggcttcacgcttttaaaatactcatcactcgccagattaatcaccacattatcgccttgtgctgcgagcgcctcgttcagcttgttggtgatgatatctccccagaattgatacagatctttccctcgggcattctcaagacggatccccatttccagacgataaggctgcattaaatcgagcgggcggagtacgccatacaagccggaaagcattcgcaaatgctgttgggcaaaatcgaaatcgtcttcgctgaaggtttcggcctgcaagccggtgtagacatcacctttaaacgccagaatcgcctggcgggcattcgccggcgtgaaatctggctgccagtcatgaaagcgagcggcgttgatacccgccagtttgtcgctgatgcgcatcagcgtgctaatctgcggaggcgtcagtttccgcgcctcatggatcaactgctgggaattgtctaacagctccggcagcgtatagcgcgtggtggtcaacgggctttggtaatcaagcgttttcgcaggactaataagaatcagcatatccagtccttgcaggaaatttatgccgactttagcaaaaaatgagaatgagttgatcgatagttgtgattactcctggctaacatcatcccacgcgtccggagaaagctggcgaccgatatccggataacgcaatggatcaaacaccgggcgcacgccgagtttacgctggcgtagataatcactggcaatggtatgaaccacagggctgagcagtaaaatggcggtcaaattggtaatagccatgcaggccattatgatatctgccagttgccacatcagcggaaggcttagcaaggtgccgccgatgaccgttgcgaaggtgcagatccgcaaacaccagatcgctttagggttgttcaggcgtaaaaagaagagattgttttcggcataaatgtagttggcaacgatggagctgaaggcaaacagaataaccacaagggtaacaaactcagcaccccaggaacccattagcacccgcatcgccttctggataagctgaataccttccagcggcatgtaggttgtgccgttacccgccagtaatatcagcatggcgcttgccgtacagatgaccagggtgtcgataaaaatgccaatcatctggacaatcccttgcgctgccggatgcggaggccaggacgccgctgccgctgccgcgtttggcgtgctacccattcccgcctcattggaaaacatactgcgctgaaaaccgttagtaatcgcctggcttaaggtatatcccgccgcgccgcctgccgcttcctgccagccaaaagcactctcaaaaatagaccaaatgacgtggggaagttgcccgatattcattacgcaaattaccaggctggtcagtacccagattatcgccatcaacgggacaaagccctgcatgagccgggcgacgccatgaagaccgcgagtgattgccagcagagtaaagacagcgagaataatgcctgtcaccagcgggggaaaatcaaaagaaaaactcagggcgcgggcaacggcgttcgcttgaactccgctgaaaattatgccataggcgatgagcaaaaagacggcgaacagaacgcccatccagcgcatccccagcccgcgcgccatataccatgccggtccgccacgaaactgcccattgacgtcacgttctttataaagttgtgccagagaacattcggcaaagctggtcgccatgccgataaacgcggcaacccacatccaaaagacggctccaggtccaccggcggtaatagccagcgcaacgccggccaggttgccgctacccacgcgcgccgcaagactggtacacaaactctgaaaactggttaaaccgcctggctgtggatgaatgctatttttaagacttttgccaaactggcggatgtagcgaaactgcacaaatccggtgcgaaaagtgaaccaacaacctgcgccgaagagcaggtaaatcattacgcttccccaaaggacgctgttaatgaaggagaaaaaatctggcatgcatatccctcttattgccggccgcgatgactttcctgtgtaaacgttaccaattgtttaagaagtatatacgctacgaggtacttgataacttctgcgtagcatacatgaggttttgtataaaaatggcgggcgatatcaacgcagtgtcagaaatccgaaacagtctcgcctggcgataaccgtcttgtcggcggttgcgctgacgttgcgtcgtgatatcatcagggcagaccggttacatccccctaacaagctgtttaaagagaaatactatcatgacggacaaattgacctcccttcgtcagtacaccaccgtagtggccgacactggggacatcgcggcaatgaagctgtatcaaccgcaggatgccacaaccaacccttctctcattcttaacgcagcgcagattccggaataccgtaagttgattgatgatgctgtcgcctgggcgaaacagcagagcaacgatcgcgcgcagcagatcgtggacgcgaccgacaaactggcagtaaatattggtctggaaatcctgaaactggttccgggccgtatcagtactgaagttgatgcgcgtctttcctatgacaccgaagcgagtattgcgaaagcaaaacgcctgatcaaactctacaacgatgctggtattagcaacgatcgtattctgatcaaactggcttctacctggcagggtatccgtgctgcagaacagctggaaaaagaaggcatcaactgtaacctgaccctgctgttctccttcgctcaggctcgtgcttgtgcggaagcgggcgtgttcctgatcagcccgtttgttggccgtattcttgactggtacaaagcgaataccgataagaaagagtacgctccggcagaagatccgggcgtggtttctgtatctgaaatctaccagtactacaaagagcacggttatgaaaccgtggttatgggcgcaagcttccgtaacatcggcgaaattctggaactggcaggctgcgaccgtctgaccatcgcaccggcactgctgaaagagctggcggagagcgaaggggctatcgaacgtaaactgtcttacaccggcgaagtgaaagcgcgtccggcgcgtatcactgagtccgagttcctgtggcagcacaaccaggatccaatggcagtagataaactggcggaaggtatccgtaagtttgctattgaccaggaaaaactggaaaaaatgatcggcgatctgctgtaatcattcttagcgtgaccgggaagtcggtcacgctacctcttctgaagcctgtctgtcactcccttcgcagtgtatcattctgtttaacgagactgtttaaacggaaaaatcttgatgaatactttacgtattggcttagtttccatctctgatcgcgcatccagcggcgtttatcaggataaaggcatccctgcgctggaagaatggctgacaagcgcgctaaccacgccgtttgaactggaaacccgcttaatccccgatgagcaggcgatcatcgagcaaacgttgtgtgagctggtggatgaaatgagttgccatctggtgctcaccacgggcggaactggcccggcgcgtcgtgacgtaacgcccgatgcgacgctggcagtagcggaccgcgagatgcctggctttggtgaacagatgcgccagatcagcctgcattttgtaccaactgcgatccttagccgtcaggtgggcgtgattcgcaaacaggcgctgatccttaacttacccggtcagccgaagtctattaaagagacgctggaaggtgtgaaggacgctgagggtaacgttgtggtacacggtatttttgccagcgtaccgtactgcattcagttgctggaagggccatacgttgaaacggcaccggaagtggttgcagcattcagaccgaagagtgcaagacgcgacgttagcgaataaaaaaatccccccgagcggggggatctcaaaacaattagtgggattcaccaatcggcagaacggtgcgaccaaactgctcgttcagtacttcacccatcgccagatagattgcgctggcaccgcagatcagcccaatccagccggcaaagtggatgattgcggcgttaccggcaatgttaccgatcgccagcagggcaaacagcacggtcaggctaaagaaaacgaattgcagaacgcgtgcgcctttcagcgtgccgaagaacataaacagcgtaaatacgccccacagacccaggtagacaccaaggaactgtgcatttggcgcatcggtcagacccagtttcggcatcagcagaatcgcaaccagcgtcagccagaaagaaccgtaagaggtgaatgcggttaaaccgaaagtgttgccttttttgtactccagcagaccagcaaaaatttgcgcgatgccgccgtagaaaatgcccatggcaagaataataccgtccagagcgaaataacccacgttgtgcaggttaagcagaatggtggtcatgccgaagcccatcaggcccagcggtgccggattagccaacttagtgttgcccataattcctcaaaaatcatcatcgaatgaatggtgaaataatttccctgaataactgtagtgttttcagggcgcggcataataatcagccagtggggcagtgtctacgatcttttgaggggaaaatgaaaattttccccggtttccggtatcagacctgagtggcgctaaccatccggcgcaggcaggcgatttgcagtacggctggaatcgtcacgcgataggcgctgccgctgaccgctttaaccccatttagtgccgcacctacagggcctcccagccccgcgccgcgcagcaaaccatgcccaagtacgctcattgctgcgtgggtgcgtaaaatgcgggtcagttggctggaaagcaaatggctcacaccttttgccaataatttgtctttcatcagcagcggcagcagctcttccagctcattcaccctggcatcgaccgcgtgcagaaactcctgcttatgttcctcgtccattttcttccaggtattacgcagaaattgttccagtaactgttgctcaatttcaaacgtagacatctctttgtcggctttcagcttcaatcgcttactaacatcgagcaaaatggcccgatacaatttaccgtgtccgcgcagtttgttggcgatactatcgccaccaaaatgctgtaattctccggcaatcagctgccagttgcggcgatgttgctcgggatgcccttccatgcttttaaacagttcgttgcgcatcagtacgctggagaggcgagttttgcctttttcattatgggtgagcaatcgggcgaaatttgccaactgttcctcactacaatgctgaagaaaatccagatcactatcattcaggtaattaacattcattttttgtggcttctatattctggcgttagtcgtcgccgataattttcagcgtggccatatcgctactgttcaccgtatgaccgctaaaggtgattttactgacgcagcgtttattgtcgttatcgctgttaatgttgatccagtcagtggtttgcccttcttttatttcactaggaatattcaggctctgactggcgctacgggcggctttgaaataaacgcttgcaccgcttaactgtaaatcgccatggtcggcagagagttgtatgcgtttcacaatgcgacaaacaggaagtttcagcgccagatcgttggtttcgttacgcggcattgcaatggcgccgaggagtttatggtcgtttgcctgcgccgtgcagcacagcatcaggctaatcgccaggctggcggaaatcgtaaaaacggatttcataaggattctcttagtgggaagaggtagggggatgaatacccactagtttactgctgataaagagaagattcaggcacgtaatcttttctttttattacaattttttgatgaatgccttggctgcgattcattctttatatgaataaaattgctgtcaattttacgtcttgtcctgccatatcgcgaaatttctgcgcaaaagcacaaaaaatttttgcatctcccccttgatgacgtggtttacgaccccatttagtagtcaaccgcagtgagtgagtctgcaaaaaaatgaaattgggcagttgaaaccagacgtttcgcccctattacagactcacaaccacatgatgaccgaatatatagtggagacgtttagatgggtaaaataattggtatcgacctgggtactaccaactcttgtgtagcgattatggatggcaccactcctcgcgtgctggagaacgccgaaggcgatcgcaccacgccttctatcattgcctatacccaggatggtgaaactctagttggtcagccggctaaacgtcaggcagtgacgaacccgcaaaacactctgtttgcgattaaacgcctgattggtcgccgcttccaggacgaagaagtacagcgtgatgtttccatcatgccgttcaaaattattgctgctgataacggcgacgcatgggtcgaagttaaaggccagaaaatggcaccgccgcagatttctgctgaagtgctgaaaaaaatgaagaaaaccgctgaagattacctgggtgaaccggtaactgaagctgttatcaccgtaccggcatactttaacgatgctcagcgtcaggcaaccaaagacgcaggccgtatcgctggtctggaagtaaaacgtatcatcaacgaaccgaccgcagctgcgctggcttacggtctggacaaaggcactggcaaccgtactatcgcggtttatgacctgggtggtggtactttcgatatttctattatcgaaatcgacgaagttgacggcgaaaaaaccttcgaagttctggcaaccaacggtgatacccacctggggggtgaagacttcgacagccgtctgatcaactatctggttgaagaattcaagaaagatcagggcattgacctgcgcaacgatccgctggcaatgcagcgcctgaaagaagcggcagaaaaagcgaaaatcgaactgtcttccgctcagcagaccgacgttaacctgccatacatcactgcagacgcgaccggtccgaaacacatgaacatcaaagtgactcgtgcgaaactggaaagcctggttgaagatctggtaaaccgttccattgagccgctgaaagttgcactgcaggacgctggcctgtccgtatctgatatcgacgacgttatcctcgttggtggtcagactcgtatgccaatggttcagaagaaagttgctgagttctttggtaaagagccgcgtaaagacgttaacccggacgaagctgtagcaatcggtgctgctgttcagggtggtgttctgactggtgacgtaaaagacgtactgctgctggacgttaccccgctgtctctgggtatcgaaaccatgggcggtgtgatgacgacgctgatcgcgaaaaacaccactatcccgaccaagcacagccaggtgttctctaccgctgaagacaaccagtctgcggtaaccatccatgtgctgcagggtgaacgtaaacgtgcggctgataacaaatctctgggtcagttcaacctagatggtatcaacccggcaccgcgcggcatgccgcagatcgaagttaccttcgatatcgatgctgacggtatcctgcacgtttccgcgaaagataaaaacagcggtaaagagcagaagatcaccatcaaggcttcttctggtctgaacgaagatgaaatccagaaaatggtacgcgacgcagaagctaacgccgaagctgaccgtaagtttgaagagctggtacagactcgcaaccagggcgaccatctgctgcacagcacccgtaagcaggttgaagaagcaggcgacaaactgccggctgacgacaaaactgctatcgagtctgcgctgactgcactggaaactgctctgaaaggtgaagacaaagccgctatcgaagcgaaaatgcaggaactggcacaggtttcccagaaactgatggaaatcgcccagcagcaacatgcccagcagcagactgccggtgctgatgcttctgcaaacaacgcgaaagatgacgatgttgtcgacgctgaatttgaagaagtcaaagacaaaaaataatcgccctataaacgggtaattatactgacacgggcgaaggggaatttcctctccgcccgtgcattcatctaggggcaatttaaaaaagatggctaagcaagattattacgagattttaggcgtttccaaaacagcggaagagcgtgaaatcagaaaggcctacaaacgcctggccatgaaataccacccggaccgtaaccagggtgacaaagaggccgaggcgaaatttaaagagatcaaggaagcttatgaagttctgaccgacagccaaaaacgtgcggcatacgatcagtatggtcatgctgcgtttgagcaaggtggcatgggcggcggcggttttggcggcggcgcagacttcagcgatatttttggtgacgttttcggcgatatttttggcggcggacgtggtcgtcaacgtgcggcgcgcggtgctgatttacgctataacatggagctcaccctcgaagaagctgtacgtggcgtgaccaaagagatccgcattccgactctggaagagtgtgacgtttgccacggtagcggtgcaaaaccaggtacacagccgcagacttgtccgacctgtcatggttctggtcaggtgcagatgcgccagggattcttcgctgtacagcagacctgtccacactgtcagggccgcggtacgctgatcaaagatccgtgcaacaaatgtcatggtcatggtcgtgttgagcgcagcaaaacgctgtccgttaaaatcccggcaggggtggacactggagaccgcatccgtcttgcgggcgaaggtgaagcgggcgagcatggcgcaccggcaggcgatctgtacgttcaggttcaggttaaacagcacccgattttcgagcgtgaaggcaacaacctgtattgcgaagtcccgatcaacttcgctatggcggcgctgggtggcgaaatcgaagtaccgacccttgatggtcgcgtcaaactgaaagtgcctggcgaaacccagaccggtaagctattccgtatgcgcggtaaaggcgtcaagtctgtccgcggtggcgcacagggtgatttgctgtgccgcgttgtcgtcgaaacaccggtaggcctgaacgaaaggcagaaacagctgctgcaagagctgcaagaaagcttcggtggcccaaccggcgagcacaacagcccgcgcagtaagagcttctttgatggtgtgaagaagttttttgacgacctgacccgctaacctccccaaaagcctgcccgtgggcaggcctgggtaaaaatagggtgcgttgaagatatgcgagcacctgtaaagtggcggggatcactctacctcaatgtgtatcacaatatccatattctttgtgggggagtctggagattgagtagatattcttgttcagaatgtatcagccgatggttctacgattcttaagccacgaagagttcagatagtacaacggcatgtctcttttgactatctggcaaccggcagtgtgttctctcacgcatcacaaaagcagcaggcataaaaaaacccgcttgcgcgggctttttcacaaagcttcagcaaattggcgattaagccagtttgttgatctgtgcagtcaggttagccttatgacgtgcagctttgtttttgtggatcagacctttagcagcctgacggtccacgatcggttgcatttcgttaaatgctttctgtgcagcagctttgtcgccagcttcgatagctgcgtatactttcttgatgaaagtacgcatcatagagcgacggcttgcgttgtgcttacgagccttttcagactgaatggcgcgcttcttagcacttttgatattagccaaggtccaactcccaaatgtgttctatatggacaattcaaaggccgaggaatatgcccttttagccttcttttgtcaatggatttgtgcaaataagcgccgttaatgtgccggcacagcttacgtagtgatggcgcaggattctaccagcttgcggggtgtgaatacagcttttccgcgataaaaattgcagcaggcggtcagtttcttcccgtgatttgcgccatggcaatgaaaagccacttctttctgattagcgtactcaatcgccggttaaccttgaccgctgtacaaggtatactcggacgatttagcctgttttgagccagacatgaagctgatacgcggcatacataatctcagccaggccccgcaagaagggtgtgtgctgactattggtaatttcgacggcgtgcatcgcggtcatcgcgcgctgttacagggcttgcaggaagaagggcgcaagcgcaacttaccggtgatggtgatgctttttgaacctcaaccactggaactgtttgctaccgataaagccccggcaagactgacccggctgcgggaaaaactgcgttaccttgcagagtgtggcgttgattacgtgctgtgcgtgcgtttcgacaggcgtttcgcggcgttaaccgcgcaaaatttcatcagcgatcttctggtgaagcatttgcgcgtaaaatttcttgccgtaggtgatgatttccgctttggcgctggtcgtgaaggcgatttcttgttattacagaaagctggcatggaatacggcttcgatatcaccagtacgcaaactttttgcgaaggtggcgtgcgcatcagcagcaccgccgtgcgtcaggcccttgcggatgacaatctggctctggcagagagtttactggggcacccgtttgccatctccgggcgtgtagtccacggtgatgaattagggcgcactataggtttcccgacggcgaatgtaccgctgcgccgtcaggtttccccggtgaaaggggtttatgcggtagaagtgctgggcctcggtgaaaagccgttacccggcgtggcaaacatcggaacacgcccaacggttgccggtattcgccagcagctggaagtgcatttgttagatgttgcaatggacctttacggtcgccatatacaagtagtgctgcgtaaaaaaatacgcaatgagcagcgatttgcgagcctggacgaactgaaagcgcagattgcgcgtgatgaattaaccgcccgcgaattttttgggctaacaaaaccggcttaagcctgttatgtaatcaaaccgaaatacggaaccgagaatctgatgagtgactataaaagtaccctgaatttgccggaaacagggttcccgatgcgtggcgatctcgccaagcgcgaacccggaatgctggcgcgttggactgatgatgatctgtacggcatcatccgtgcggctaaaaaaggcaaaaaaaccttcattctgcatgatggccctccttatgcgaatggcagcattcatattggtcacagcgttaacaagattctgaaagacattatcgtgaagtccaaagggctttccggttatgacagcccgtatgtgcctggctgggactgccacggtctgccgatcgagctgaaagtcgagcaagaatacggtaagccgggtgagaaattcaccgccgccgagttccgcgccaagtgccgcgaatacgcggcgacccaggttgacggtcaacgcaaagactttatccgtctgggcgtgctgggcgactggagccacccgtacctgaccatggacttcaaaactgaagccaacatcatccgcgcgctgggcaaaatcatcggcaacggtcacctgcacaaaggcgcgaagccagttcactggtgcgttgactgccgttctgcgctggcggaagcggaagttgagtattacgacaaaacttctccgtccatcgacgttgctttccaggcagtcgatcaggatgcactgaaagcaaaatttgccgtaagcaacgttaacggcccaatcagcctggtaatctggaccaccacgccgtggactctgcctgccaaccgcgcaatctctattgcaccagatttcgactatgcgctggtgcagatcgacggtcaggccgtgattctggcgaaagatctggttgaaagcgtaatgcagcgtatcggcgtgaccgattacaccattctcggcacggtaaaaggtgcggagcttgagctgctgcgctttacccatccgtttatgggcttcgacgttccggcaatcctcggcgatcacgttaccctggatgccggtaccggtgccgttcacaccgcgcctggccacggcccggacgactatgtgatcggtcagaaatacggcctggaaaccgctaacccggttggcccggacggcacttatctgccgggcacttatccgacgctggatggcgtgaacgtcttcaaagcgaacgacatcgtcgttgcgctgctgcaggaaaaaggcgcgctgctgcacgttgagaaaatgcagcacagctatccgtgctgctggcgtcacaaaacgccgatcatcttccgcgcgacgccgcagtggttcgtcagcatggatcagaaaggtctgcgtgcgcagagtctgaaagagatcaaaggcgtgcagtggatcccggactggggccaggcgcgtatcgagagcatggttgctaaccgtcctgactggtgtatctcccgtcagcgcacctggggtgtaccgatgagtctgttcgtgcacaaagacacggaagagctgcatccgcgtacccttgaactgatggaagaagtggcaaaacgcgttgaagtcgatggcatccaggcgtggtgggatctcgatgcgaaagagatcctcggcgacgaagctgatcagtacgtgaaagtgccggacacattggatgtatggtttgactccggatctacccactcttctgttgttgacgtgcgtccggaatttgccggtcacgcagcggacatgtatctggaaggttctgaccaacaccgcggctggttcatgtcttccctaatgatctccaccgcgatgaagggtaaagcgccgtatcgtcaggtactgacccacggctttaccgtggatggtcagggccgcaagatgtctaaatccatcggcaataccgttagcccgcaggatgtgatgaacaaactgggcgcggatattctgcgtctgtgggtggcaagtaccgactacaccggtgaaatggccgtttctgacgagatcctgaaacgtgctgccgatagctatcgtcgtatccgtaacaccgcgcgcttcctgctggcaaacctgaacggttttgatccagcaaaagatatggtgaaaccggaagagatggtggtactggatcgctgggccgtaggttgtgcgaaagcggcacaggaagacatcctcaaggcgtacgaagcatacgatttccacgaagtggtacagcgtctgatgcgcttctgctccgttgagatgggttccttctacctcgacatcatcaaagaccgtcagtacaccgccaaagcggacagtgtggcgcgtcgtagctgccagactgcgctatatcacatcgcagaagcgctggtgcgctggatggcaccaatcctctccttcaccgctgatgaagtgtggggctacctgccgggcgaacgtgaaaaatacgtcttcaccggtgagtggtacgaaggcctgtttggcctggcagacagtgaagcgatgaacgatgcgttctgggacgagctgttgaaagtgcgtggcgaagtgaacaaagtcattgagcaagcgcgtgccgacaagaaagtgggtggcagcctggaagcggcagtaaccttgtatgcagaaccggaactgagcgcgaaactgaccgcgctgggcgatgaattacgatttgtcctgttgacctccggcgctaccgttgcagactataacgacgcacctgctgatgctcagcagagcgaagtactcaaagggctgaaagtcgcgttgagtaaagccgaaggtgagaagtgcccacgctgctggcactacacccaggatgtcggcaaggtggcggaacacgcagaaatctgcggccgctgtgtcagcaacgtcgccggtgacggtgaaaaacgtaagtttgcctgatgagtcaaagcatctgtagtacagggctacgctggctgtggctggtggtagtcgtgctgattatcgatctgggcagcaaatacctgatcctccagaactttgctctgggggatacggtcccgctgttcccgagccttaatctgcattatgcgcgtaactatggcgcggcgtttagtttccttgccgatagcggcggctggcagcgttggttctttgccggtattgcgattggtattagcgtgatcctggcagtgatgatgtatcgcagcaaggccacgcagaagctaaacaatatcgcttacgcgctgattattggcggcgcgctgggcaacctgttcgaccgcctgtggcacggcttcgttgtcgatatgatcgacttctacgtcggcgactggcacttcgccaccttcaaccttgccgatactgccatctgtgtcggtgcggcactgattgtgctggaaggttttttgccttctagagcgaaaaaacaataataaaccctgccggatgcgatgctgacgcatcttatccggcctacagattgctgcgaaatcgtaggccggataaggcgtttacgccgcatccggcaaaaatccttaaatataagagcaaacctgcatgtctgaatctgtacagagcaatagcgccgtcctggtgcacttcacgctaaaactcgacgatggcaccaccgccgagtctacccgcaacaacggtaaaccggcgctgttccgcctgggtgatgcttctctttctgaagggctggagcaacacctgttggggctgaaagtgggcgataaaaccaccttcagcttggagccagatgcggcgtttggcgtgccgagtccggacctgattcagtacttctcccgccgtgaatttatggatgcaggcgagccagaaattggcgcaatcatgctttttaccgcaatggatggcagtgagatgcctggcgtgatccgcgaaattaacggcgactccattaccgttgatttcaaccatccgctggccgggcagaccgttcattttgatattgaagtgctggaaatcgatccggcactggaggcgtaacatgcagatcctgttggccaacccgcgtggtttttgtgccggggtagaccgcgctatcagcattgttgaaaacgcgctggccatttacggcgcaccgatatatgtccgtcacgaagtggtacataaccgctatgtggtcgatagcttgcgtgagcgtggggctatctttattgagcagattagcgaagtaccggacggcgcgatcctgattttctccgcacacggtgtttctcaggcggtacgtaacgaagcaaaaagtcgcgatttgacggtgtttgatgccacctgtccgctggtgaccaaagtgcatatggaagtcgcccgcgccagtcgccgtggcgaagaatctattctcatcggtcacgccgggcacccggaagtggaagggacaatgggccagtacagtaacccggaagggggaatgtatctggtcgaaagcccggacgatgtgtggaaactgacggtcaaaaacgaagagaagctctcctttatgacccagaccacgctgagcgtggatgacacgtctgatgtgatcgacgcgctgcgtaaacgcttcccgaaaattgtcggtccgcgcaaagatgacatctgctacgccacgactaaccgtcaggaagcggtacgcgccctggcagaacaggcggaagttgtgttggtggtcggtagcaaaaactcctccaactccaaccgtctggcggagctggcccagcgtatgggcaaacgcgcgtttttgattgacgatgcgaaagacatccaggaagagtgggtgaaagaggttaaatgcgtcggcgtgactgcgggcgcaagcgctccggatattctggtgcagaatgtggtggcacgtttgcagcagctgggcggtggtgaagccattccgctggaaggccgtgaagaaaacattgttttcgaagtgccgaaagagctgcgtgtcgatattcgtgaagtcgattaagtcattagcagcctaagttatgcgaaaatgccggtcttgttaccggcattttttatggagaaaacatgcgtttacctatcttcctcgatactgaccccggcattgacgatgccgtcgccattgccgccgcgatttttgcacccgaactcgacctgcaactgatgaccaccgtcgcgggtaatgtcagcgttgagaaaactacccgcaatgccctgcaactgctgcatttctggaatgcggagattccgctcgcccaaggggccgctgtgccactggtacgcgcaccgcgtgatgcggcatctgtgcacggcgaaagcggaatggctggctacgactttgttgagcacaaccgaaagccgctcgggataccggcgtttctggcgattcgggatgccctgatgcgtgcaccagagcctgttaccctggtggccatcggcccgttaaccaatattgcgctgttacttagtcaatgcccggaatgcaagccgtatattcgccgtctggtgatcatgggtggttctgccggacgcggcaactgtacgccaaacgccgagtttaatattgctgccgatccagaagctgctgcctgtgtcttccgcagtggtattgaaatcgtcatgtgcggtttggatgtcaccaatcaggcaatattaactcctgactatctctctacactgccgcagttaaaccgtaccgggaaaatgcttcacgccctgtttagccactaccgtagcggcagtatgcaaagcggcttgcgaatgcacgatctctgcgccatcgcctggctggtgcgcccggacctgttcactctcaaaccctgttttgtggcagtggaaactcagggcgaatttaccagtggcacgacggtggttgatatcgacggttgcctgggcaagccagccaatgtacaggtggcattggatctggatgtgaaaggcttccagcagtgggtggctgaggtgctggctctggcgagctaacctgtcacatgttattggcatgcagtcattcatcgactcatgcctttcactgatatccctccctgtttatcattaatttctaattatcagcgtttttggctggcggcgtagcgatgcgctggttactctgaaaacggtctatgcaaattaacaaaagagaatagctatgcatgatgcaaacatccgcgttgccatcgcgggagccggggggcgtatgggccgccagttgattcaggcggcgctggcattagagggcgtgcagttgggcgctgcgctggagcgtgaaggatcttctttactgggcagcgacgccggtgagctggccggagccgggaaaacaggcgttaccgtgcaaagcagcctcgatgcggtaaaagatgattttgatgtgtttatcgattttacccgtccggaaggtacgctgaaccatctcgctttttgtcgccagcatggcaaagggatggtgatcggcactacggggtttgacgaagccggtaaacaagcaattcgtgacgccgctgccgatattgcgattgtctttgctgccaattttagcgttggcgttaacgtcatgcttaagctgctggagaaagcagccaaagtgatgggtgactacaccgatatcgaaattattgaagcacatcatagacataaagttgatgcgccgagtggcaccgcactggcaatgggagaggcgatcgcccacgcccttgataaagatctgaaagattgcgcggtctacagtcgtgaaggccacaccggtgaacgtgtgcctggcaccattggttttgccaccgtgcgtgcaggtgacatcgttggtgaacataccgcgatgtttgccgatattggcgagcgtctggagatcacccataaggcgtccagccgtatgacatttgctaacggcgcggtaagaagcgctttgtggttgagtggtaaggaaagcggtctttttgatatgcgagatgtacttgatctcaataatttgtaaccacaaaatatttgttatggtgcaaaaataacacatttaatttattgattataaagggctttaatttttggcccttttatttttggtgttatgtttttaaattgtctataagtgccaaaaattacatgttttgtcttctgtttttgttgttttaatgtaaattttgaccatttggtccacttttttctgctcgtttttatttcatgcaatcttcttgctgcgcaagcgttttccagaacaggttagatgatctttttgtcgcttaatgcctgtaaaacatgcatgagccacaaaataatataaaaaatcccgccattaagttgacttttagcgcccatatctccagaatgccgccgtttgccagaaattcgtcggtaagcagatttgcattgatttacgtcatcattgtgaattaatatgcaaataaagtgagtgaatattctctggagggtgttttgattaagagtgcgctattggttctggaagacggaacccagtttcacggtcgggccataggggcaacaggtagcgcggttggggaagtcgttttcaatactagtatgaccggttatcaagaaatcctcactgatccttcctattctcgtcaaatcgttactcttacttatccccatattggcaatgtcggcaccaatgacgccgatgaagaatcttctcaggtacatgcacaaggtctggtgattcgcgacctgccgctgattgccagcaacttccgtaataccgaagacctctcttcttacctgaaacgccataacatcgtggcgattgccgatatcgatacccgtaagctgacgcgtttactgcgcgagaaaggcgcacagaatggctgcattatcgcgggcgataacccggatgcggcgctggcgttagaaaaagcccgcgcgttcccaggtctgaatggcatggatctggcaaaagaagtgaccaccgcagaagcctatagctggacacaagggagctggacgttgaccggtggcctgccagaagcgaaaaaagaagacgagctgccgttccacgtcgtggcttatgattttggtgccaagcgcaacatcctgcggatgctggtggatagaggctgtcgcctgaccatcgttccggcgcaaacttctgcggaagatgtgctgaaaatgaatccagacggcatcttcctctccaacggtcctggcgacccggccccgtgcgattacgccattaccgccatccagaaattcctcgaaaccgatattccggtattcggcatctgtctcggtcatcagctgctggcgctggcgagcggtgcgaagactgtcaaaatgaaatttggtcaccacggcggcaaccatccggttaaagatgtggagaaaaacgtggtaatgatcaccgcccagaaccacggttttgcggtggacgaagcaacattacctgcaaacctgcgtgtcacgcataaatccctgttcgacggtacgttacagggcattcatcgcaccgataaaccggcattcagcttccaggggcaccctgaagccagccctggtccacacgacgccgcgccgttgttcgaccactttatcgagttaattgagcagtaccgtaaaaccgctaagtaatcaggagtaaaagagccatgccaaaacgtacagatataaaaagtatcctgattctgggtgcgggcccgattgttatcggtcaggcgtgtgagtttgactactctggcgcgcaagcgtgtaaagccctgcgtgaagagggttaccgcgtcattctggtgaactccaacccggcgaccatcatgaccgacccggaaatggctgatgcaacctacatcgagccgattcactgggaagttgtacgcaagattattgaaaaagagcgcccggacgcggtgctgccaacgatgggcggtcagacggcgctgaactgcgcgctggagctggaacgtcagggcgtgttggaagagttcggtgtcaccatgattggtgccactgccgatgcgattgataaagcagaagaccgccgtcgtttcgacgtagcgatgaagaaaattggtctggaaaccgcgcgttccggtatcgcacacacgatggaagaagcgctggcggttgccgctgacgtgggcttcccgtgcattattcgcccatcctttaccatgggcggtagcggcggcggtatcgcttataaccgtgaagagtttgaagaaatttgcgcccgcggtctggatctctctccgaccaaagagttgctgattgatgagagcctgatcggctggaaagagtacgagatggaagtggtgcgtgataaaaacgacaactgcatcatcgtctgctctatcgaaaacttcgatgcgatgggcatccacaccggtgactccatcactgtcgcgccagcccaaacgctgaccgacaaagaatatcaaatcatgcgtaacgccagcatggcggtgctgcgtgaaatcggcgttgaaaccggtggttccaacgttcagtttgcggtgaacccgaaaaacggtcgtctgattgttatcgaaatgaacccacgcgtgtcccgttctagcgcgctggcgagcaaagcgaccggtttcccgattgctaaagtggcggcgaaactggcggtgggttacaccctcgacgaactgatgaacgacatcactggcggacgtactccggcctccttcgagccgtccatcgactatgtggttactaaaattcctcgcttcaacttcgaaaaattcgccggtgctaacgaccgtctgaccactcagatgaaaagcgttggcgaagtgatggcgattggtcgcacgcagcaggaatccctgcaaaaagcgctgcgcggcctggaagtcggtgcgactggattcgacccgaaagtgagcctggatgacccggaagcgttaaccaaaatccgtcgcgaactgaaagacgcaggcgcagatcgtatctggtacatcgccgatgcgttccgtgcgggcctgtctgtggacggcgtcttcaacctgaccaacattgaccgctggttcctggtacagattgaagagctggtgcgtctggaagagaaagtggcggaagtgggcatcactggcctgaacgctgacttcctgcgccagctgaaacgcaaaggctttgccgatgcgcgcttggcaaaactggcgggcgtacgcgaagcggaaatccgtaagctgcgtgaccagtatgacctgcacccggtttataagcgcgtggatacctgtgcggcagagttcgccaccgacaccgcttacatgtactccacttatgaagaagagtgcgaagcgaatccgtctaccgaccgtgaaaaaatcatggtgcttggcggcggcccgaaccgtatcggtcagggtatcgaattcgactactgttgcgtacacgccagcctggcgctgcgcgaagacggttacgaaaccattatggttaactgtaacccggaaaccgtctccaccgactacgacacttccgaccgcctctacttcgagccggtaactctggaagatgtgctggaaatcgtgcgtatcgagaagccgaaaggcgttatcgtccagtacggcggtcagaccccgctgaaactggcgcgcgcgctggaagctgctggcgtaccggttatcggcaccagcccggatgctatcgaccgtgcagaagaccgtgaacgcttccagcatgcggttgagcgtctgaaactgaaacaaccggcgaacgccaccgttaccgctattgaaatggcggtagagaaggcgaaagagattggctacccgctggtggtacgtccgtcttacgttctcggcggtcgggcgatggaaatcgtctatgacgaagctgacctgcgtcgctacttccagacggcggtcagcgtgtctaacgatgcgccagtgttgctggaccacttcctcgatgacgcggtagaagttgacgtggatgccatctgcgacggcgaaatggtgctgattggcggcatcatggagcatattgagcaggcgggcgtgcactccggtgactccgcatgttctctgccagcctacaccttaagtcaggaaattcaggatgtgatgcgccagcaggtgcagaaactggccttcgaattgcaggtgcgcggcctgatgaacgtgcagtttgcggtgaaaaacaacgaagtctacctgattgaagttaacccgcgtgcggcgcgtaccgttccgttcgtctccaaagccaccggcgtaccgctggcaaaagtggcggcgcgcgtgatggctggcaaaagcctggctgagcagggcgtaaccaaagaagttatcccgccgtactacagcgtgaaagaagtggtgctgccgttcaataaattcccgggcgttgacccgctgttagggccagaaatgcgctctaccggggaagtcatgggcgtgggccgcaccttcgctgaagcgtttgccaaagcgcagctgggcagcaactccaccatgaagaaacacggtcgtgcgctgctttccgtgcgcgaaggcgataaagaacgcgtggtggacctggcggcaaaactgctgaaacagggcttcgagctggatgcgacccacggcacggcgattgtgctgggcgaagcaggtatcaacccgcgtctggtaaacaaggtgcatgaaggccgtccgcacattcaggaccgtatcaagaatggcgaatatacctacatcatcaacaccaccagtggccgtcgtgcgattgaagactcccgcgtgattcgtcgcagtgcgctgcaatataaagtgcattacgacaccaccctgaacggcggctttgccaccgcgatggcgctgaatgccgatgcgactgaaaaagtaattagcgtgcaggaaatgcacgcacagatcaaataatagcgtgtcatggcagatatttttcatccgctaatttgatcgaataactaatacggttctctgatgaggaccgtttttttttgcccattaagtaaatcttttggggaatcgatatttttgatgacataagcaggatttagctcacacttatcgacggtgaagttgcatactatcgatatatccacaattttaatatggccttgtttaattgcttcaaaacgagtcatagccagacttttaatttgtgaaactggagttcgtatgtgtgaaggatatgttgaaaaaccactctacttgttaatcgccgaatggatgatggctgaaaatcggtgggtgatagcaagagagatctctattcatttcgatattgaacacagcaaggcggttaataccctgacttatattctgagcgaagtcacagaaataagctgcgaagttaagatgatccctaataagctggaagggcggggatgccagtgtcagcgactggttaaagtggtcgatatcgatgagcaaatttacgcgcgcctgcgcaataacagtcgggaaaaattagtcggtgtaagaaagacgccgcgtattcctgccgttccgctcacggaacttaaccgcgagcagaagtggcagatgatgttgagtaagagtatgcgtcgttaattttatctcgttgataccgggcgtcctgcttgccagatgcgatgttgtagcatcttatccagcaaccaggtcgcatccggcaagatcaccgtttaggcgtcacatccgtcgtcccctgcaaacgggggcgattttcctccatttgcctcagtggctgcgtttcatgtaagcttacatgacagcgcccgacaagatcctgatactctttggtattcaaccgtttccagtgtaactcgtcgtcactaacattgcgtacagcgcgggctggcgtacccatcaacaactggcgtttctcgccgcgaaagcccgctttgacaaagctcatggcggcaacaatgctctcttcgccaatgaccgcgccatccataatcacgctgttcatcccgaccaatgcatcgcgaccaatcaaacaaccatgcaggatcgctccgtgcccgatatggccgttttccccaacgatagtgtcagtgtcgcagtagccatgcataatgcagccatcctgaatattggctcccgcttgcacgatcaaccgcccgtagtcaccacgcagactggcgagtgggccgatgtagacaccggctcccacaatcacatcgccaatcaagacggcactgggatggacaaacgccgtcgggtgaaccaccggaattaacccctcaaaggcgtaatagctcacggttgttaacgtcctttccacaccggatcgcgcttctcggcaaacgccagcggcccttcaatggcatcttcgctatgcagaacgcttggatagtgtttcaacacgccgctgcgaatatagcgatacgcttcttctaccggcatttcgctggtggtgcggtagatctctttcagcgccgcaatcgccagcggggcgctgttaaccagctgctgagccagttcgcgggcgttatccatcagttccgcctggctaaccacgcggttgactatcccccaacgcagcgcctcttctgcgcccattcgtctgccggtcatcaccatttcattgacgatggcaggcggcaggatcttcggcagacgcagcacaccgccgctgtcaggaacgatgcccagtttggcttccggcagggcgaagctggcgttatcggcacaaacaataaaatctgccgccagcgccagttcaaagccgccgccaaaggcatagccgttcacagctgcgataaccggtttgtcgagattgaaaatttcggttaatcccgcaaaaccacccggaccaaagtcagcatccggtgcttcgccttctgctgccgcttttaaatcccagcccgcggaaaagaacttctctccggcaccggtaataatggcgacacgtaattgcggatcgtcacggaaatttagaaatacttcgcccatttcaaagctggtttttgcatcaatagcattcgcttttggacgatcaagggtaatttccagaatacttccattgcgggtcagatgtaaactttcactcattccttttctccatttttgctttttcagggagctcaacatccctgcaaaaaatgcatattgttttagagtgtgattattagctggcagggtagttccctgctgtttcatttatttcagattctttctaattattttcccgctgcaattacgtggcagatcttttctgatctccagataagagggcactttaaatttcgccatattttgttcgcagaagcggaaaaattcctcttcgctcaatgtttcaccttcattcagcaccacaaatgctttgatggcttcatcgcgaatgctatctttaatacccacaaccacgatgtcctgaattttcgggtgcgcggcgataatattttccagctccacgcaggagacattctcgccgccacgtttaatcatattgcagcggcgatcgacgaaataaaaaaagtcctcttcgtcgcggtatccggtatcgccggtatgcagccagccatcggcttccagcactttcgcagtggcttgtgggttgagaaagtactctttgaagatggttttcccaggtatgcctttaatgcagatttcaccgatctcaccagccgggagcgggcgattgtgatcgtcgcggatctccgcttcgtagcaaaaccccacccgaccaatgctcggccagcgtcgtttatcgccaggacgatcgccgataatgcccacaatggtttccgtcatcccataagacgtcagcaagcgaacgccgaagcgttcacaaaacgcatctttttcctgctcgctcaagttgagataaaacatcacttcccgcaggcggtgttgctgatcgttcgcactaggcggctgtaccatcaacgtacggatcatcatcggaatacattcggtaacggtggcgcggtacttctgtacctgtccccagaaggcgcgggcgctgtatttctcgaccagcacaaaggtggccccggcagaaaacgccgccatcgccgcagtacactggcaatcgatatgaaacgcaggcattaccgtcaggtagacgtcatcgtcacgcagtgcacactgccaggcggagtaatatccagcgaagcgcaggttgtaatgggtaatcaccacacctttcggtcgggaggtggtgccggaggtgaagagaatttccgccgtatcgtcagtgcttagcggcggtgcatagcacaaggtggcaggttgttgatttttcagttgagtaaagctactcacgccatcatcagcgggaagtgccacatctgtcaggcaaatgtgccgcaattgagtggcatcttcctgctgaatctgttgatacataggatagaattgcgcactggtcaccagcaggcacgcctggctattttgcaggatccacgcgctttcctcgcacaacaggcgggcgttaatcggcaccataatcgcgccaatttttgccagcccgaaccagcaaaagataaattccgggcagttgtcgagatgtagtgcaaccttgtcgcctttgcgaatccccagcgtataaaacaggtttgccgtgcggttaatctcctgatttaactcaagataactataccggttaacgactccgccgctggattcacaaatcagcgccgttttatgaccgtaaacgtccgcaagatcgtcccacatttgacgtagatgttgtccgccaatgatatccattgcacctctatccatttttgttcgtttgttattgggcgggcgctagtcaggcaagccgactgacgccacgcgtttagtcctcaactttggccagacctttgctgaccaactcctgaatgtcgttttcgctgtagccgatatttttcaaaatggcagccgtgtccataccatgactgggcattccgcgccagatttgtccggggttatttttgaatttcggcatgatgttcggccctttgcaggtgcgaccatccatcgtttgccactgagtgatactttcgcgagccacatactgtggattgctttccagttccggtacggtcagcactttggcgcaggcgatattcagttcagcaaagcgttcttttacttccgcgatggtatgtgtcgccagccaggcatcgagtttctcttcaaccagtgggccgtaagggcattcgatacggtggataagctgagtgccttccgggatttctggcgtgccaagcagatgtgcgaggccaatatctttaaagcactcttcaatttgggtaatgcccaccagttccatcacgatgtagccgtcggcacatttatacagaccgcaaccggcgtagtagggatctttacctttgctcatgcgcgggcacatttcgccgccgttgaagtaatccatcatgaagtactggcccatacgcagcatcacttcatacatggcgatgtcgatactttcgcctttaccggtttcacgcactttatgcagtgctgccagcgccgccgtggtggcggtcaggccagaaaagtaatcggcggtatacgggaaggcaggcattggctggtcaacatcaccgttctgaatcaggtaaccactaaaggcctgggcgatagtgttataggccggaagattggtgtactcctcggtgccgtactgaccaaaaccggacaggtgagcgataaccagtttcgggttgtgctgccacagtacttcatcggtaatgccacgacgggcaaaggccggacctttactggcttcgatgaagatatcggtggtttccattaatttcagaaacgcttcgcggccttcatctttgaaaatatttaagctcagcgcgtgcaaattgcggcgggagagttgcgggtagttcggttgaacgcgaatggtgtcggcccaggcgacgttctcgatccagataacttccgcgccccattctgcgaacatttgcccggcaaacggtccggcgatttcgataccggagaagacaacgcgcaatccggccaacggcccgaatttcggcatgggtagatgatccattatttgctcctgaaaaatttatgtagcgcatgactgccggatgcggcgtaaacgctttatccggcctacattcgtgctcccgtaggcctgataagacgcatcagcgtcgcatcaggcagcgcacggacttagcggtattgcttcagcaccgcacgacccagcgtcaggatctgcatttcgtcagatcccccggagacgcggtctacacgcagatcacgccagaagcggctgatgcggtggttgcccgcaatcccgacaccgcccagcacctgcattgcgctatccacaacttcaaatgccgcattggcgcagaagtatttgcacatcgctgcatcgccagaggtgatggtgccgttgtctgctttccacgctgcttcatacagcatgtttttcatggagtttaatttgatcgccatgtgggcgaatttttcctgaatcaactggaaacgaccaatagcctcgccaaactgcacgcgctgattggcgtagcgcgccgcatcttcaaaggcgcacatcgccgtaccgtagttggtgagggctaccaggaaacgttcatggtcgaactcttctttgacgcggttaaagccgttaccttcccgaccgaacatgtctttctcgtccagttccacgtcgtcaaaggtgatttcacagcagctatccatacgcagaccgagcttttcaagtttggtcactttgatgcccggtttgctcatatcaacaaaccattcggtgtagacaggtttgtccggagaagccccgtcgcgcgccatcaccacgatgtacggggtgtaggcgctgctggtaataaaacacttactaccattaagataaatcttaccatttctacgggtataagtcgttttcaggctacccacgtcggagcccgcgcccggttcggtaatcgcactgttccacatctgcttaccggtgccgcggaaagccataattttgtcgatctgctcttgtgtgccttcgcgcaggaaggtgttgaacccgcccggcaactggtacagcacataggttggtgcccccagacgtcccagctccatccacacggcggcgagagtaacaaaccccgcgtccagaccaccgtgctcttcagggatcagcagactgtcgatacccatatccgccagtgctttgacaaaacgttccgggtagacgctgtcacggtcgcactcggcaaaataggcctcccagttttcgctggccatcagttcgcggataccggcgacaaacagttcctgctcatcatttaaattaaaatccatctttcaacctcttgatattttgggggttaattaatctttccagttctgtttcgcgtctttaataaaggagagcgtcaccataatgttgacgaagaacagcgggcatcctccggcgataatggcggtttgaatcggtttcaggccgccgagcgccagcagaacaataccgataatgccaaccagaatactccaaccgatacgcaccagcagaggtggttcttcaccatcgcgtacttcgcggcaagtggacatcgccagggtataagagcaggcgttaaccagcgtaacggtggcaataaagcagaggatgaagaagccccacatggtggcggtgctgagtggcagagcggcccaggtttcaatgatggcgcgcgccacaccgtactgttcgatcagatttggaatgttgatgatgtttttatctatcaacagcagagtgttactaccgagtacagtccacaggatccaggtactcgctgtcagccccagcaccatgccgaagcacagttcacgcacagtacgaccacgggagatgcgggcgaggaagatactcatctggatagcataaatcacccaccatgcccagtagaacacggtccagccctgcgggaagccgcctttagcgatgggatcggtatagaacaacatgcgcggcagatacatcagcaacatccccacgctatcggtgaagtagttcatgatgaagctggcaccgctgacaatgaacacccaacccagcatcaggaagctcaggtaactacgcacgtcactggcgatacgtacccctttttgcagaccgcaagcgacgcaaatggcgttgaggataatccagcaggtaatgatgatagcgtccagttgcagggtatgcggaatgccaaacaaccattgcatacactcggtcaccagcggcgtggcaaggcccagactggtacccatcgcgaagatcaaggcgacgagatagaagttgtcgacgatagtgccgaacaaccctttggcgtgtttttcacctaccagcggcaccagtgtgctgctggggcgaatcacttccattttgcggacaaagaagaagtaagcgaaggcgacactaaggaagctgtaagtggcccacggcagaggtccccagtggaacaagctgtaagccagccccaactctttcgcccctgtgctgttcggttctaagccaaacggcggggtggagatgtagtagtagatctcaatgcttccccagaacagtacggcagcagacgtacaggaggcgaacatcataaagatccaactggcggtgctaaattctggcggttcgttacctaaacgctttttggcatacgggccaaacaccagccagaaccaaccgaaaagcatcaccaccatataccattcaaatgcccatccccatacattggtgacgtaactgaatacagcattaataacgacattcgctgcatccagatctctgactgtaagccaacaaagtatgccgacgattattaacggcggaaagaaaaccttcggttctattcccgtttttctcttttcattcttcatgagttaattccactgtgaaaacgaatatttattttgcgttcccgtttgttttatttttgttaacatttaatataattattattaacctcgtggacgcgttaatggctaactcataatgggtattcaataagctgtattctgtgattggtatcacatttttgtttcgggtgaatagagggcgttttttcgttaattttgattaataatcagtttgttatgctctgttgtgagtaaaaaataacatctgactttcaatattggtgatccataaaacaatattgaaaatttctttttgctacgccgtgttttcaatattggtgaggaacttaacaatattgaaagttggatttatctgcgtgtgacattttcaatattggtgattaaagttttatttcaaaattaaagggcgtgatatctgtaattaacaccaccgatatgaacgacgtttccttcatgatttctggagatgcaatgaagattattacttgctataagtgcgtgcctgatgaacaggatattgcggtcaataatgctgatggtagtttagacttcagcaaagccgatgccaaaataagccaatacgatctcaacgctattgaagcggcttgccagctaaagcaacaggcagcagaggcgcaggtgacagccttaagtgtgggcggtaaagccctgaccaacgccaaagggcgtaaagatgtgctaagccgcggcccggatgaactgattgtggtgattgatgaccagttcgagcaggcactgccgcaacaaacggcgagcgcactggctgcagccgcccagaaagcaggctttgatctgatcctctgtggcgatggttcttccgacctttatgcccagcaggttggtctgctggtgggcgaaatcctcaatattccggcagttaacggcgtcagcaaaattatctccctgacggcagataccctcaccgttgagcgcgaactggaagatgaaaccgaaaccttaagcattccgctgcctgcggttgttgctgtttccactgatatcaactccccacaaattcctagcatgaaagccattctcggcgcggcgaaaaagcccgtccaggtatggagcgcggcggatattggttttaacgcagaggcagcctggagtgaacaacaggttgccgcgccgaaacagcgcgaacgtcagcgcatcgtgattgaaggcgacggcgaagaacagatcgccgcatttgctgaaaatcttcgcaaagtcatttaattacaggggatgctatgaacacgttttctcaagtctgggtattcagcgataccccttctcgtctgccggaactgatgaacggtgcgcaggctttagctaatcaaatcaacacctttgtcctcaatgatgccgacggcgcacaggcaatccagctcggcgctaatcatgtctggaaattaaacggcaaaccggacgatcggatgatcgaagattacgccggtgtcatggctgacactattcgccagcacggcgcagacggcctggtgctgctgccaaacacccgtcgcggcaaattactggcggcaaaactgggttatcgccttaaagcggcggtgtctaacgatgccagcaccgtcagcgtacaggacggtaaagcgacagtgaaacacatggtttacggtggtctggcgattggcgaagaacgcattgccacgccgtatgcggtactgaccatcagcagcggcacgttcgatgcggctcagccagacgcgagtcgcactggcgaaacgcacaccgtggagtggcaggctccggctgtggcgattacccgcacggcaacccaggcgcgccagagcaacagcgtcgatctcgacaaagcccgtctggtggtcagcgtcggtcgcggtattggcagcaaagagaacattgcgctggcagaacagctttgcaaggcgataggtgcggagttggcctgttctcgtccggtggcggaaaacgaaaaatggatggagcacgaacgctatgtcggtatctccaacctgatgctgaaacctgaactgtacctggcggtggggatctccgggcagatccagcacatggttggcgctaacgcgagccaaaccattttcgccatcaataaagataaaaatgcgccgatcttccagtacgcggattacggcattgttggcgacgccgtgaagatccttccggcgctgaccgcagctttagcgcgttgatccactctggcagggctgcattttggccctgccgctgacagggagctcttatgtccgaagatatctttgacgccatcatcgtcggtgcagggcttgccggtagcgttgccgcactggtgctcgcccgcgaaggtgcgcaagtgttagttatcgagcgtggcaattccgcaggtgccaagaacgtcaccggcgggcgtctctatgcccacagtctggaacacattattcctggtttcgccgactccgcccccgtagaacgcctgatcacccatgaaaaactcgcgtttatgacggaaaagagtgcgatgactatggactactgcaatggtgacgaaaccagcccatcccagcgttcttactccgttttgcgcagtaaatttgatgcctggctgatggagcaggccgaagaagcgggcgcgcagttaattaccgggatccgcgtcgataacctcgtacagcgcgatggcaaagtcgtcggtgtagaagccgatggcgatgtgattgaagcgaaaacggtgatccttgctgatggggtgaactccatccttgccgaaaaattggggatggcaaaacgcgtcaaaccgacggatgtggcggttggcgtgaaggaactgatcgagttaccgaagagcgttattgaagaccgttttcagttgcagggtaatcagggggcggcttgcctgtttgcgggaagtcccaccgatggcctgatgggcggcggcttcctttataccaatgaaaacaccctgagcctggggctggtttgtggtttgcatcatctgcatgacgcgaaaaaaagcgtgccgcaaatgctggaagatttcaaacagcatccggccgttgcaccgctgatcgcgggcggcaagctggtggaatattccgctcacgtagtgccggaagcaggcatcaacatgctgccggagttggttggtgacggcgtattgattgccggtgatgccgccggaatgtgtatgaacctcggttttaccattcgcggtatggatctggcgattgccgccggggaagccgcagcaaaaaccgtgcttagtgcgatgaaaagcgacgatttcagtaagcaaaaactggcggaatatcgtcagcatcttgagagtggtccgctgcgcgatatgcgtatgtaccagaaactaccggcgttccttgataacccacgcatgtttagcggctacccggagctggcggtgggtgtggcgcgtgacctgttcaccattgatggcagcgcgccggaactgatgcgcaagaaaatcctccgccacggcaagaaagtgggcttcatcaatctaatcaaggatggcatgaaaggagtgaccgttttatgacttctcccgtcaatgtggacgtcaaactgggcgtcaataaattcaatgtcgatgaagagcatccgcacattgttgtgaaggccgatgctgataaacaggcgctggagctgctggtgaaagcgtgccccgcaggtctgtacaagaagcaggatgacggcagtgtgcgcttcgattacgccggatgtctggagtgcggcacctgtcgcattctggggctggggagcgcgctggaacagtgggaatacccgcgcggcacctttggtgtggagttccgttacggctgatgttggtttgatacgtaacgccgcactgactctcattgcaaaaaacaggaataaccatgcaaccgtccagaaactttgacgatctcaaattctcctctattcaccgccgcattttgctgtggggaagcggtggtccgtttctggatggttatgtactggtaatgattggcgtggcgctggagcaactgacgccggcgctgaaactggacgctgactggattggcttgctgggcgcgggaacgctcgccgggctgttcgttggcacaagcctgtttggttatatttccgataaagtcggacggcgcaaaatgttcctcattgatatcatcgccatcggcgtgataagcgtggcgacgatgtttgttagttcccccgtcgaactgttggtgatgcgggtacttatcggcattgtcatcggtgcagattatcccatcgccaccagtatgatcaccgagttctccagtacccgtcagcgggcgttttccatcagctttattgccgcgatgtggtatgtcggcgcgacctgtgccgatctggtcggctactggctttatgatgtggaaggcggctggcgctggatgctgggtagcgcggcgatcccctgtttgttgattttgattggtcgattcgaactgcctgaatctccccgctggttattacgcaaagggcgagtaaaagagtgcgaagagatgatgatcaaactgtttggcgaaccggtggctttcgatgaagagcagccgcagcaaacccgttttcgcgatctgtttaatcgccgccattttccttttgttctgtttgttgccgccatctggacctgccaggtgatcccaatgttcgccatttacacctttggcccgcaaatcgttggtttgttgggattgggggttggcaaaaacgcggcactagggaatgtggtgattagcctgttctttatgctcggctgtattccgccgatgctgtggttaaacactgccggacggcgtccattgttgattggcagctttgccatgatgacgctggcgctggcggttttggggctaatcccggatatggggatctggctggtagtgatggcctttgcggtgtatgcctttttctctggcgggccgggtaatttgcagtggctctatcctaatgaactcttcccgacagatatccgcgcctctgccgtgggcgtgattatgtccttaagtcgtattggcaccattgttagcacctgggcactaccgatctttatcaataattacggtatcagtaacacgatgctaatgggggcgggtatcagcctgtttggcttgttgatttccgtagcgtttgccccggagactcgagggatgagtctggcgcagaccagcaatatgacgatccgcgggcagagaatggggtaaattgttcagatttctctcttttctgaatcaatattattgactataagccgcgtgaatatatgactacactttgtgggaaaacaaaggcgtaatcacgcgggctacctatgattcttataatttatgcgcatccgtatccgcatcattcccatgcgaataaacggatgcttgaacaggcaaggacgctggaaggcgtcgaaattcgctctctttatcaactctatcctgacttcaatatcgatattgccgccgagcaggaggcgctgtctcgcgccgatctgatcgtctggcagcatccgatgcagtggtacagcattcctccgctcctcaaactttggatcgataaagttttctcccacggctgggcttacggtcatggcggcacggcgctgcatggcaaacatttgctgtgggcggtgacgaccggcggcggggaaagccattttgaaattggtgcgcatccgggctttgatgtgctgagccagccgctacaggcgacggcaatctactgcgggctgaactggctgccaccgtttgccatgcactgcacctttatttgtgacgacgaaaccctcgaagggcaggcgcgtcactataagcaacgtctgctggaatggcaggaggcccatcatggataattaaggaatggcaggaggcccatcatggatagccatacgctgattcaggcgctgatttatctcggtagcgcagcgctgattgtacccattgcggtacgtcttggtctgggaagcgtacttggctacctgatcgccggctgcattattggcccgtgggggctgcgactggtgaccgatgccgaatctattctgcactttgccgagattggggtggtgctgatgctgtttattatcggcctcgaactcgatccacaaaggctgtggaagctgcgtgcggcagtgttcggctgtggcgcattgcagatggtgatttgcggcggcctgctggggctgttctgcatgttacttgggctgcgctggcaggtcgcggaattgatcggcatgacgctggcgctctcctctacggcgattgccatgcaggcgatgaatgaacgcaatctgatggtgacgcaaatgggtcgcagtgcctttgcggtgctgctgttccaggatatcgcggcgatcccgctggtggcgatgattccgctactggcaacgagcagtgccagcacgacgatgggcgcatttgctctcagcgcgttaaaagtggcgggtgcgctggtgctggtggtattgctggggcgctatgtcacgcgtccggcgctgcgttttgtagcccgctctggcttgcgggaagtgtttagtgccgtggcgttattcctcgtgtttggctttggtttgctgctggaagaggtcggcttgagcatggcgatgggcgcgtttctggcgggcgtactgctggcaagcagcgaataccgtcatgcgctggagagcgatatcgaaccatttaaaggtttgctgttggggctgtttttcatcggtgttggcatgagcatagactttggcacgctgcttgaaaacccattgcgcattgtcattttgctgctcggtttcctcatcatcaaaatcgccatgctgtggctgattgcccgaccgttgcaagtgccaaataaacagcgtcgttggtttgcggtgttgttagggcagggcagtgagtttgcctttgtggtatttggcgcggcgcagatggcgaatgtgctggagccggagtgggcgaaaagcctgaccctggcggtggcgctgagcatggcagcaacgccgattctgctggtgatcctcaatcgccttgagcaatcttctactgaggaagcgcgtgaagccgatgagatcgacgaagaacagccgcgcgtgattatcgccggattcggtcgttttgggcagattaccggacgtttactgctctccagcggggtgaaaatggtggtactcgatcacgatccggaccatatcgaaaccttgcgtaaatttggtatgaaagtgttttatggcgatgccacgcggatggatttactggaatctgccggagcggcgaaagcggaagtgctgattaacgccatcgacgatccgcaaaccaacctgcaactgacagagatggtgaaagaacatttcccgcatttgcagattattgcccgcgcccgcgatgtcgaccactacattcgtttgcgtcaggcaggcgttgaaaagccggagcgtgaaaccttcgaaggtgcgctgaaaaccgggcgtctggcactggaaagtttaggtctggggccgtatgaagcgcgagaacgtgccgatgtgttccgccgctttaatattcagatggtggaagagatggcaatggttgagaacgacaccaaagcccgcgcggcggtctataaacgcaccagcgcgatgttaagtgagatcattaccgaggaccgcgaacatctgagtttaattcaacgacatggctggcagggaaccgaagaaggtaaacataccggcaacatggcggatgaaccggaaacgaaacccagttcctaataaagagtgacgtaaatcacactttacagctaactgtttgtttttgtttcattgtaatgcggcgagtccagggagagagcgtggactcgccagcagaatataaaattttcctcaacatcatcctcgcaccagtcgacgacggtttacgctttacgtatagtggcgacaattttttttatcgggaaatctcaatgatcagtctgattgcggcgttagcggtagatcgcgttatcggcatggaaaacgccatgccgtggaacctgcctgccgatctcgcctggtttaaacgcaacaccttaaataaacccgtgattatgggccgccatacctgggaaagtatcggtcgtccgttgccaggacgcaaaaatattatcctcagcagtcaaccgggtacggacgatcgcgtaacgtgggtgaagagcgtggatgaagccatcgcggcgtgtggtgacgtaccagaaatcatggtgattggcggcggtcgcgtttatgaacagttcttgccaaaagcgcaaaaactgtatctgacgcatatcgacgcagaagtggaaggcgacacccatttcccggattacgagccggatgactgggaaagcgtattcagcgaattccacgatgctgatgcgcagaactctcacagctattgctttgagattctggagcggcggtaattttgtatagaatttacggctagcgccggatgcgacgccggtcgcgtcttatccggccttcctatatcaggctgtgtttaagacgccgccgcttcgcccaaatccttatgccggttgctcggctggacaaaatactgtttatcttcccagcgcaggcaggttaatgtaccaccccagcagcagccggtatccagcgcgtatataccttccggcgtacctttgccctccaggcttgcccagtgaccaaaggcgatgctgtattcttcagcgacagggccaggaatcgcaaaccacggtttcagtggggcaggggcctcttccgggctttctttgctgtacatatccagttgaccgttcgggaagcaaaaacgcatacgggtaaaagcgttggtgataaaacgcagtcttcccagcccccgcaattccggactccagttatttggcatatcgccgtacatggcatcaagaaagaagggataggagtcactgcttagcaccgcttctacatcgcgtgcgcactctttggcggtctgcagatcccactgcggcgtgatccctgcgtgggccatcaccagctttttctcttcgtcgatttgcagcagaggctggcgccgcagccagttaagcagctcgtcggcatccggcgcttccagcagcggtgtcaggcgatctttcggtttattgcggctgatcccggcaaataccgccagcagatgcagatcgtgattgcccagcaccagacgtacgctgtcgcctaaggatttcacatagcgcagaacatccaggctacccggcccgcgcgcgaccagatcgcccgtcagccagagggtatctttcccaggggtaaattctactttatgcagcaatgcgatcagttcatcgtaacaaccatgaacgtcgccaataaggtatgtcgccatattcttttaatgaatgagtgtgggaacggcgagtcggaatacgggaatgtcgatgctgaaagggacgccattttcatcgatcatttcgtagtgaccctgcatggtgcccagcggggtttcaatgattgcaccgctggtgtactggtactcttcgccaggcgcgataagtggctggacgccaaccactccttcgccctggacttcggtttcacggccattgccattggtgatcagccagtaacgccccaacaactgcactggcgctcgccccagattgcgtatggttacggtataagcaaaaacgtaacgttcattatcaggactagattgagcctcaatgtagacgctttgaacctgaatacacactcgggggctattgatcatcgttaactctcctgcaaaggcgcgttctccgccagatagttcgccatctggcaatattgcgcgacagagatattttccgctcgcatcgccgggtcgatccccattcccgttaacacctcgacgctaaacaggttgccgaggctgttacgaatggttttacgacgctggttaaaggcttcggtggtgatgcggctcaacacacgaacatctttaaccgggtgaggcatcgttgcatgaggaaccaggcgcacgacggcggaatccactttgggtggtggtgtaaaggcactcggcggtacttccagtaccgggatcacattgcaatagtattgcgccatgacgcttaatcgaccatacgctttgctgttcggtcctgcaaccagacgattcaccacctctttttgcaacataaagtgcatgtcggcaatggcatcagtatagctaaacagatggaacatcaacggcgtggagatgttataaggcaggttgccgaaaacacgcagcggctgacccattttctcggccagttcaccaaagttaaaggtcatcgcatcctgctgataaatcgtcagtttcgggcctaagaatggatgcgtttgcagacgtgccgccagatcgcggtcaagttcgatgaccgtcagctggtccagacgttcgccgaccggttcggtcaatgccgccagaccggggccgatttcgaccatcgcctggcccttttgcgggttaatggcagacacaatactgtcgatcacgaactgatcgttgagaaagttttgcccgaagcgtttacgggctaagtggccctggtggactcgattattcattgggtgttaacaatcattttgatggcgagattaagcgccgtaataaaactgccggcatcggctttgccacgtcccgccagttcaagcgcggtgccgtggtccacacttgtgcgaataaagggcaggcccagcgtaatgttcacaccgcgcccgaagccctggtattttagcacgggaagaccctgatcgtggtacatcgccagcacggcgtcggcgttatcaagatatttcggctgaaacagggtatcggcaggcagcggcccgttgagtttcatcccctgcgcccgcagctcattgagcaccggaataatggtgtctatctcttccgtacccatatgaccgccttcgcccgcgtgcggattcagcccgcagaccagaatgcgcggttcggcaataccaaatttggtccgcaaatcgtgatgcaaaatagcaatcacttcgtgcaaaagtgcaggggtgatagcgtctgcgatatcgcgcagcggtaaatgcgtcgttgccagcgccacgcgaagttcttcggtcgccagcatcatcaccacctttttcgcctggctacgctcttcgaaaaactcggtatgaccggtaaaaggaatgccagcgtcgttaataacgcctttatgcaccggacctgtgatcagcgcggcaaattcgccgttcagacaaccatcgcacgctcgcgccagcgtttccaccacataatgcccattttcaaccgctaactgccccgcagtgacaggtgcacgtagcgcgacaggaagtagcgttaatgtgcccgcagtttgcggttgtgcaggggagttgggggaataagggcggagggtgagcggcaaaccgagcatcgctgcccggttggtaaggagagtggcatcggcacaaacaaccagttcgaccggccactcacgctgtgcaagctggacaactaagtccgggccaatcccggcgggctcgccgggagtgatcacaacacgttgggttttaaccattagttgctcaggattttaacgtaggcgctggcacgttgttcctgcatccagcttgctgcttcttcgctgaacttacggttcatcagcatgcggtatgcacgatctttctgcgcagcgtcggttttatcgacattacgggtatccagcagttcgattaaatgccagccgaaactagagtgaaccggtgcactcatttgacctttgttcaggcgagtcagggcgtcacggaaggccggatcgaaaatatctggtgtagcccagccgagatcgccgccctggttagcagagcctggatcctgagagaactctttcgctgcggcagcaaaagtcgttttaccactcttgatatcagcagcaatctgttccagtttcacacgggcctgttcgtcagtcatgatcgggctcggtttcagcagaatatggcgagcatgaacttcggtcacgctgatatttttgctttcgccgcgcaggtcgttaactttcagaatatggaagccaacgccggaacgaatcgggccaacaatgtcgcctttcttcgcggtgcttaatgcctgggcgaagatcccgggcaactcctgaatacggccccagcccatctggccgccgttcagcgcctgctggtcggcagaatgagcaatcgccagcttaccgaaatcagcgccgttacgcgcctgatcgacaatggcgcgcgcctggctttccgcttcgttcacctgatcagaggtcgggttttccggcagcgggatcaggatgtggctcaggttcagctcagtgctggcgtcgttttggttacccacctgctgcgccagggattcgacttcctgcggcaggatggtgatgcgacgacgcacctcgttgttacgcacttcagagataatcatctctttgcggatctggttacgataggtgttgtagttcagtccatcgtaagccagacggctgcgcatctgatccagcgtcatgttgttctgtttcgcgatgttagcaatcgcctgatccagctgctcatcggagattttcactcccattttctgccccatctgcaggatgatttgatccatgatcaaacgttccatgatttggtggcgcagcgtcgcgtcatcaggaagttgctgccttgcctgagcagcgttcagttttacgctctgcattaatccatcaacgtcgctttccagcacgacgccgttattgacgacggctgcgactttatcgactacctggggggcagcgaaactggtattcgcgatcatggcgataccgagaagcagcgttttccagttcttcatactttttccatttcaattaaccgcactgcggattacgtggtaaatcaacaaatcacaaagtgttttgatacggcagaatgttgctacgcagcatctcttgcgtacccagaccgtagttggagctcaggccgcgaagttcgatgttaaagccgattgcgttgtcatataccgcatgttgtttatcgttatcccaaccgttcagcttccgctcgtaaccgacgcgaattgcatagcagcaggagctgtattgcacacctaacatagagtcggcttgcttgttagcattggtgtcgtagtagtaggccccaacaatggaccaacgatcggcaattggccagctggcgacagcacctacctggctaataccattcttatattgctcagcagtggaatagtacttaggcagcgtagcctgaatatattccgggctggcgtaacggtaattcagctgtaccagacggtcttcatcccgacggtattcaatgctggagttactggtcgctacgttatccagacgtgtatcgtactgaatcccgccacgcaatccccaacgctcggagatacgccagtaagtatcgcctgcccacaccagactacccgttttgtcgtcattctcccatgttatgttgtcatcgccagtgcgagactccgtgaaatagtagatttgaccaacggaaatattaaaacgttcaacggcagcatcatcatatatgcgagatgtgacaccggtcgtcacctggttagcggaggcaatacggtcaagaccgccgtaagtccggtcccggaacaggccagagtagtcagattgcagcagagagctgtcgtagttatagatgtcgctctgatcgcgatacggcacgtacaaatactgcgcgcgcggttccagcgtttgggtataacccggagccagcatttccatatcgcgttcaaagaccattttgccgtcaactttgaattgcggcattacgcggttaacggattcgtccagcttggtcgtgtttctggagttataccagtcaagattggtttgctgataatgggttgccagcaacttcgcttcggtattgatgctgccccagttattagagagcggcaaattgatggtcggttccaggtgaacacgggttgcttcaggcatgtcgtctctggtgttaacaaagtgcactgcctggccgtaaatacgcgtatcaaacggaccaacatcattctggtagtaattaacgtctaactgcggctctgcgctgtagctactggtgttctgttcgctgaaaacctggaactgcttggtactaacggtggcattgaagttttgcaccgcatagccaacgctgaatttttgcgttgcgtagccgtcagtactggaaccgtacttgttatcgaaatcattgaagtagctaggatcgctgaccttggtgtagtcgacgttgaaacgccacacctgatccatgaccccggagtggttccagtagaataaccaacgacgactactgtcatcgttcgggtgttcatcttcatagactttatcactaggcagatagtccagttccatcaagccagcgcccgcctgggagaggtagcggaattcgttctcccacatgatgttgccacgacgatgcatataatgcggcgtgatggtggcatccatatttggcgcgatgttccagtaatatggcaggtagaactcaaagtagttggtggtggtgtacttggcgttcgggatcaagaaaccagagcgacgtttgtcacccaccggcaactgcaaataggggctataaaagatcggtaccggacccaccttaaagcgggcgttccagatctccgcaacttgttcttcgcggtcatgaataatttcgctacctaccacgctccaggtgtcagaacccggcagacaggaggtaaagctaccgttatccagaatggtatagcggttttcgccacgttgtttcatcaggtccgctttaccgcgaccctggcgacccaccatctggtaatcaccttcccagacgttggtatctttggtgttcagattcgcccagcctttcggccctttgaggatcacctggttatcgtcgtaatggacattaccgagcgcatcaacggtacgtaccggctccggttgtcctggtgcctctttttgatggagctgcacttcgtcggcctgcagacggctgttaccctgcatgatatccacgctgccagtaaacacggcgtcatccgggtagtcccctttcgcgtggtcagcattgatagtcacgggtaagtcattggtatcgccctgtaccagaggacggtcatagcttggcacgcccaacatgcactgactggcgaggtcggctgccagtccctgttgactataaagggcggtggcaatcatggtggccaggagagtggggatacgttttttcatacgttgattttattgttccatcatcggtaacgttgcgcgtgacaaacggtcagagactaacgtactcgtcatctctacgctagtgttaatcctgtccgaatagcgtcagtggtgttaggcacggcattgaatgacaggtatgataatgcaaattataggcgatgtcccacaattgaccgcagccggaaaacggtaaaagcacctttatattgtgggagatagccctgatatccgtgtgtcgatttggggaatatatgcagtattggggaaaaatcattggcgtggccgtggccttactgatgggcggcggcttttggggcgtagtgttaggcctgttaattggccatatgtttgataaagcccgtagccgtaaaatggcgtggttcgccaaccagcgtgagcgtcaggcgctgttttttgccaccacttttgaagtgatggggcatttaaccaaatccaaaggtcgcgtcacggaggctgatattcatatcgccagccagttgatggaccgaatgaatcttcatggcgcttcccgtactgcggcgcaaaatgcgttccgggtgggaaaaagtgacaattacccgctgcgcgaaaagatgcgccagtttcgcagtgtctgctttggtcgttttgacttaattcgtatgtttctggagatccagattcaggcggcgtttgctgatggtagtctgcacccgaatgaacgggcggtgctgtatgtcattgcagaagaattagggatctcccgcgctcagtttgaccagtttttgcgcatgatgcagggcggtgcacagtttggcggcggttatcagcagcaaactggcggtggtaactggcagcaagcgcagcgtggcccaacgctggaagatgcctgtaatgtgctgggcgtgaagccgacggatgatgcgaccaccatcaaacgtgcctaccgtaagctgatgagtgaacaccatcccgataagctggtggcgaaaggtttgccgcctgagatgatggagatggcgaagcagaaagcgcaggaaattcagcaggcatatgagctgataaagcagcagaaagggtttaaatgaccctgtaaatgatgctgagtaactgcccacgattaaaggtggccgccctggcggtcacttctttgagaaaaggcgtttactcagaatggtggacaggctcaatgcacgatttacgggaggggttctgtaggttttatcgcgttgaccctgcttaaggttgagagctttacgacgagcggaattatatttttacgtcttaaaaataaaaaacacatacctgaatgagcgatttttgaaagtatatttattcagaacgcgcatcatgagtttttaactcaatgcgaggctattaccatgaaagtaagtgttccaggcatgccggttacacttttaaatatgagcaagaacgatatttataagatggtgagcggggacaagatggacgtgaagatgaatatctttcaacgcttgtgggagacgttacgccatctgttctggagtgataaacagactgaggcttataaacttctgttcaatttcgtgaataaccagactggcaacatcaacgccagtgaatactttactggggctatcaacgagaatgagagagaaaagtttatcaatagcctggaattattcaataaacttaaaacatgcgcaaaaaatccggatgagttggtcgcaaagggcaatatgcgctgggtcgcccagaccttcggggatatcgagttaagtgtcacttttttcattgaaaagaataagatatgtactcagacgttgcagctgcataagggccaaggtaacttgggcgttgatcttagaaaggcttaccttcccggcgttgacatgagggattgttaccttggtaaaaaaacaatgaaaggtagcaatgatatcctttatgagagacctgggtggaatgctaacctgggcgtgctaccccggacggtgctaccccggacggtgctaacccggacggtgctaacctggacggtgctaccgtgaacggtgctacctccttatatgatgaggtaattattattaataaaatcccccccaaaaaaattgatactaaaggagttgctactgaagaagttgctactaaaaaagtactgctgaacaaattactgacaacgcaattattgaatgagccagaataagctaaggttgaaggggctggaacgccccttcaaccttagcagtagcgtgggatgatttcacaattagaaagacctgcatgatgagctagagaagaggctagtgacgcaaggcgtcgtgcaggacacggatcaccgagatgggcatcgccaaccagactgctaattagcccatgaataacaatcagaaaggaccataacagacccgttaaaatgaaatataagagacggtcaacgggtgaagaaaaagttcaaaaattcgctgtggagcaggaagggaattaccgaatggaaagcgtagccacacgcaacaactgaaagcagtttggcagaaacaaaaaatccccggactcggggatttatgtacaagaggcagcccttaggatgagggtataaacgtacaggaaaggttaaaaatccgctggcgctttaaacgtcatactattgccatacgccggatgggtaatcgtcaacatctctgcatgtagcaacaaacgtggtgccatcgctctcgcttctggacttgcataaaaacgatcgccgagaatcggatgacccagcgccagcatatgcacacgcaattgatggctacgcccggtaatcggttttaacaccactcttgccgtgttatccgccgcatactccaccacttcatattccgtctgcgcaggtttacccgtttcgtaacagactttctgtttcgggcggtttggccagtcgcaaatcagcggcagatccaccagaccttctgcgggggatggatgcccccagacgcgggccacatactgctttttcggctcgcgctcgcggaactggcgttttaactcccgctccgcggctttggtcagcgccactacaatcacgccgctggtagccatatccagacgatgcacgctttctgcctgcggataatcacgctgaatgcgcgtcatcacgctgtctttgtgctcttccagacgacccggcacactcaacaaaccgctcggcttgttgaccaccataatatggtcatcctgatacaggataaccaaccagggttcctgcggtggattgtagttttccatccccattttcggctccgttactgatgcgttacaacgatcaaacgcagggcatccagacgccaacctgcctgatccaggctttccattacctgctgacggttgctctcaatggcggtcagttcgtcgtcacgaatgttcgggttcactgcacgcagagcttccagacgagacagctcggcagacagtttttcgtcggcttcgttacgcgctgcatcaatcaatgcacgggcagatttctcgatctgcgcttcacccagttgaaggatagcgtgaacatcctgctgcacggcgttaaccagtttgctgccggtgtgacggttaaccgcgttaagctggcggttaaaggtttcaaactctacctgcgccgccaggttgttgccgtttttatccagcagcatacgtaccggcgtcggtggcaggaagcggttgagctgcaactgcttcggagcctgggcttcaaccacataaatcagttccaccaacagcgtacctaccggcaacgctttgttttttaacagactaatcgtgctgctaccggtatcgccagaaaggatcagatccagaccgttgcggatcagcggatgctcccaggtaataaactgtgcatcttcacgcgccagcgccacttcacgatcaaaggtgatggtgatgccatcttcgctcaggccagggaagtccggcaccagcatatgatcggacggcgtcagcacgatcatgttgtcgccgcgatcgtcctgattgataccgataatatcgaacaggttcatggcgaaggcgatcaggttggtatcgtcatcctgctcttcaatgctttctgccagtgcctgggctttttcgccaccgttggagtggatttccagcaggcggtcacgaccctgttccagctgtgctttcagcgcttcatgttgctcgcggcagtttttgatcagatcgtcaaagccttcggtttgatccggactagccagatagttaatcagatcgttgtatacgctatcgtaaatagtgcgtccggtcgggcaggtgtgctcaaatgcatccagaccttcgtgataccagcgcaccagcacgctctgagcggttttctccagataaggcacatggatctgaatatcgtgcgcctggccgatacgatccagacgaccaatacgctgctccagtagatccgggttgaatggcaggtcaaacatcaccatgtggctggcgaactggaagttacgtccttcagaaccgatttcactgcacagcagtacctgtgcgccggtgtcttcttcggcaaaccaggcggcagcgcggtcacgttcgataatgctcataccttcgtggaacaccgcagcgcgaataccttcacgttcgcgcagtacctgctccagttgcagcgcagtggcagctttggcgcagatcaccagcactttctgagagcgatggctggtcaggtagcccatcagccactcaacgcgcggatcgaagttccaccaggtggcgttatcaccttcaaattcctgataaatacgctccgggtagagcatatcgcgagcacgatcttccgcacttttacgtgcgcccataatgccggagactttaatagccgtctgatactgcgtcggtagcggcagcttaatggtgtgcagctcgcgtttcgggaatcctttcacaccgttacgcgtgttacggaacagcacgcggctggtgccgtggcgatccatcagcatgctaaccagctcctgacgggcgctctgggcatcttcgctgtcgctgtttgctgcctgcaacagcggctcgatatcctgctcgccgatcatctcgccgagcatgttcagttcgtcattgctcagtttgttacctgccagcagcatggcaacggcgtccgcaaccggacgataatttttctgctcttcaacgaactgcgcaaaatcgtggaaacggttcgggtccagcagacgcagacgggcgaagtggctttccatccccagctgttccggggtcgcggtcagcagcagaacgcccggcacgtgctctgccagttgttcaatggcctgatattcacggcttggcgcatcttcgctccacaccaggtgatgcgcttcatcgaccaccagcaggtcccattcggcttcacagagatgttccaggcgctgtttgctacgacgggcaaaatccaggctgcaaatcaccagctgttcggtgtcaaacgggttgtaagcatcgtgctgagcttcggcataacgctcatcatcaaatagcgcaaagcgcaggttgaaacggcgcagcatttctaccagccactgatgctgtaaggtttccgggacgataattagcacacgttcagcagcgccagagagcagttgctgatgcaggatcatcccggcttcaatggttttccctaaacccacttcgtcagccagcaggacgcgcggcgcgtggcggcgaccaacatcatgagcgatgttgagctgatgcgggatcaggctggtacgctgaccgcgcaggccgctgtacggcatacggaactgttcgctggaatatttacgcgcgcgataacgcagcgcaaagcggtccatacggtcaatctgcccggcaaacagacggtcctgcggtttgctgaacaccagtttgctatcaaggaaaacttcacgcagggctacgccggactcttcagtatccaggcgagtaccgatataggtcagcaagccattttcttcttttacttcttcgacttgcatctgccagccgtcatggctggtaatggtatcaccagggttgaacatcacgcgggtcacgggggaatcactgcgtgcgtacagacggttttcaccagtagatgggaaaagtaaagtgacagttcgcgcatccaccgcgacaacggttccaagtcccaattcgctttctgtatcgctgatccagcgttgaccaagtgtaaaaggcatatgtgttcggctctatatctttaattgcaggcaataaccacccgctaccgtgcttatgaggtagtggtgttattcaggtccaggaatggaaagggcgctatggtactggatggcaaagcattcgtcacgcatcaaaatggtatctggcgaactcttttttttgctcaaaatagcccaagttgcccggtcataagtgtagcaaaattatcctcaataaaagggagtattccctccgccacgggttgtagctggcgggtcagatagtgttcgtaatccagtggactacgttggtagtccagcggctccgggccgttggtggtccatacgtacttaatggtgccgcgattctgatattgcaaggggcgaccacgcttttggttttcttcatcggcaaggcgagcggcgcgtacatgaggcggcacattacgctgatactcgctcagcggacggcgaaggcgtttacggtaaaccagtcgcgcatccagttcacccgccatcagtttgtcgatggtttcgcgtacatattcctgatatggctcgttgcggaagatgcgcaggtatagctcctgctgaaactgctgggccagcggcgtccagtcggtgcgcacggtttccagccctttaaacaccatccgctgcttgtcgccctcctgaatcagtccggcataacgctttttactgccggtatcggctccgcgaatggttggcatcagaaaacggcagaaatgggtttcatactccagttctaatgcgctggtcagccgttgtttttgcagcgtttccgcccaccaggcgttaacgtgctgcaccagtgcacgaccgattttcgccgcttcttcttcgctatgtgcgcctttcagccagacaaacgtactgtcggtatcgccgtagataacgtcgtagccctgtgcttcaatcaacgctttggtttgccgcatgatctgatgaccacgcatggtgatgctgcttgccagccgcggatcgaagaagcggcaggcggtggtgccgagcacgccataaaaggcattcatgatgattttcagcgcctggctcagcggtttgttaccctggcgtttggcttcatcgcgcccgtgccagatgttagtcacaatctccggcaggcaatgtttttctcggctgaaccaggcatcgagaaaaccttcggtactgtgctctggatcaggctgcgccatgccttccaccagcccgacgggatcaatcagaaaggtgcggatgatgctcgggtacaggcttttatagtccagcaccagcacactatcataaagccctggccgactatccatcacgtagccgccagggctggcgtgcggcggcacttcgccgagattaggcgcgacataaccagcgcgatgcattcgcggaaaatagagatgaccaaatgccgccacgctaccgccgtgtcggtccaccggcaggccgttcaccgttgcccgttcgagtaaaaatggcatgatttcagttttgtggaagatctgcgtcaccagctcgcaatctttcaggttataagttgccagcgcaggtttatcttcggcgaaacggcggtcaatttcgtccattcgatcccacgggttatcgatagattttccttcgcctaatagctcctgagcgacagtttccaggctgaaactagagaaattccagaacgcggatttcagcgcctcgataccgtcgataattagccgacctttagcctgggcaaaaaagacgccgtttttaaagccgtgctcgcgccactccagctcgctattatcgcgcccaagacgcagcggaagacggtaacgctcggcatgtttttgcagcattcgcagatcgaactgcaccacgttccaaccgatgatcacatcaggatcgtagttggcaaaccaggcgttgagtttttccagcaactgcgggcggctggcgacgtattccagttcgaaatcaaggctggaggcgtcgccattctccggccccagcatataaacgatgcgctgcccgcagccttccaggccgatgcagtacagctcaccgtggcgggtggtttcaatatctatagaaacccacttgagcggcggacgatagtcgggatgcggtttcagacgggcattaacgatagtgccattgtgcatatcaccctcgacccacaccggactggtgataaaccgctccatcagatagcgttctggcggacgcacatcggcctcgtagacggtaacgccaccttcacgcaggcgcttttcgtaattcatcaattggcgatgggcgcgacagtaaaggccatacaccggctggcggtgaaaatcctttaacgccagcggtgtcaggcgaaagccttgttcaccctgcaaaatatgctgagcgcggggaacctgatcggcgggaataaacgccacggactcttgcggtgcaagcgtaacctgcaacggcccgttgtccgtcgccagccagaaggagacttctgtcccttgcggggtgtcccgccagtgtcgggttaagataaaacctgcctgcgccacgctgaaaatccatcaaaaaaccaggcttgagtatagcctggtttcgtttgattggctgtggttttatacagtcattactgcccgtaatatgccttcgcgccatgcttacgcagatagtgtttatccagcagcgtttgctgcatatccggtaactgcggcgctaactgacggcagaatatccccatataagcgacctcttccagcacgatggcgttatgcaccgcatcttcggcatttttgccccatgcaaacgggccgtgggaatggaccagaacgccgggcatttgcgctgcatcgataccctgtttttcaaaggtttctacgatgacgttaccggtttcccactcatattcgccgttgatttctgcgtcggtcattttgcgggtgcagggaatggtgccgtagaaatagtcggcgtgggtggtgccggttgctggaatgctctgacccgcctgcgcccagatggtggcgtggcggctgtgcgtatgcacaatgccgccaatggaggggaatgcctgatagagcagccggtgagttggcgtgtcggaggagggctttttcgtaccttcaaccacttcaccggtttcgatgctaaccacgaccatatcgtcagcggtcatgacgctgtaatcgacgccggaaggtttgatcacaaagacgccgcgctcgcgatcaacggcgctgacgttgccccatgtgagcgtgaccaggttgtgttttggcagcgccaggttggcttctaatacctggcgtttgagatcttctaacatgttgactccttcgtgccggatgcgctttgcttatccggcctacaaaatcgcagcgtgtaggcctgataagacgcgccagcgtcgcatcaggcgttgaatgccggatgcgctttgcttatccggcctacaaaatcgcagcgcgtaggcctgataagacgcgccagcgtcgcatcaggcgttgaatgccggatgcgctttgcttatccggcctacaaaatcgcagcgtgtaggccagataagacgcgtcagcgtcgcatcaggcgttacataccggatgcggctacttagcgacgaaacccgtaatacacttcgttccagcgcagcgcgtctttaaacgctggcaggcgtgtgtcgttatcaatcaccgtgatttcaatgtcgtgcatctcggcgaattggcgcatatcgttgaggttcagtgcatggctgaagacggtatggtgcgcgccaccagcgaggatccacgcttcggaagcagttggcagatccggttgcgctttccacagcgcattcgccaccggcagtttcggcagggagtgcggtgttttcaccgtgtcgatgcagttaaccagtagacggtaacgatcgccgagatcaatcaagctggcgacaatcgctgggccggtttgggtattgaagatcaggcgggcaggatcgtccttaccaccaataccgagatgctgaacgtcgaggatcggtttctcttctgcggcgatgctcgggcagacttccagcatatgggagccgagcaccaggtcattacctttctcgaagtgataggtgtagtcctccataaaggaggtgccgccctgcagaccggtactcatcaccttcatgatgcgaagcagggcggcagttttccagtcgccttcgcccgcaaagccgtaaccctgctgcatcagacgctgtacggccagaccaggaagctgtttcagaccgtgcaaatcttcaaaggtggtggtgaacgcgtggaagccaccttgttccaggaaacgcttcatccccagctcaatacgcgccgcttccagcacgttctgtcgttttttgccgtggatttgtgtggcaggcgtcatggtgtagcagctttcgtactcatcgaccagcgcgttaacatcgccgtcgctgatggagttcaccacctgcaccagatcgccaaccgcccaggtattgacggagaaaccgaacttgatctgtgcggcaactttatcgccatcggtgaccgccacttcacgcatgttatcgccaaatcggcagactttcagatgacgggtatcctgtttagagaccgcctgacgcatccaggagccgatacgctcatgggcttgtttatcctgccagtgaccggtaaccacggcatgttgctgacgcatacgcgcgccaatgaagccgaactcgcgaccgccatgtgcagtctggttcaggttcataaagtccatatcgatactgtcccacggcagcgccgcgttgaactgggtgtggaattgcagcaacggtttgttgagcatggtcaggccgttgatccacattttggccggggagaaggtgtgcagccacaccaccagaccagcgcaacgatcgtcgtaattcgcgtcgcggcaaatagcggtgatttcatccggcgtggtgcccagcggtttcaacaccagtttgcagggcagtttcgcttccgtattcagcgcattaacgacgtgctcggcatgttgggtgacctgacgcagggtttccgggccatacagatgctggctgccaatgacaaaccacacttcataattatcaaaaatcgtcattatcgtgtccttatagagtcgcaacggcctgggcagcctgtgccggggcggaagttggaagatagtgttgttcggcgctcatcgcccattgctgatagcggcgataaagctgttcaaagcgttgtgcctgctcgctgcacggttgcagggttttctctaccgcactggccattttttgctgagcacttgggatgtctgcgtgcactttcgcggcgacggcagcaaaaatcgccgcaccgagcgcacagcactggtcagaggcaacaatttgcagcgggcgattcagcacgtcgcagcaggcctgcataatgacctggtttttccgcgcgatgccgcccagtgccatcacgttattaacggcgatcccctgatcggtaaagcactccatgattgcgcgtgcgccaaaggcggtggcagcaatcaaaccgccgaacagcagcggagcgtcggtagcgaggttaagatcggtaatcacccctttcaggcgttggttagcgttcggtgtgcggcggccgttaaaccagtcgagcaccaccggcaggtgatccagagacggatttttggcccatgcttcggtcagcgccggaagcagttgtttctggctggcgttgatttgcgttttcagttccggatgctgggcggcaagctgttccagcggccagccgagtacgcgaccaaaccaggcgtagatatcaccaaacgcgctttggcctgcttccagaccgataaatccaggcaccacgctgccatcaacctgaccgcaaatacctttaactgcccgctcgccaacgctctgtttgtcggcaatcagaatgtcgcaggtggaagtaccgataacttttaccagtgcgttaggctgtgcgcctgcgccaactgcgcccatatggcagtcaaacgcgccgccggaaatcaccacgctttcaggcaggccgagacgctgcgcccattccgggcataaggtgcccaccggaatatcggcagtccaagtgtcagtgaacagcggggaaggcaaatggcgattgaggatcgggtccagctcatcaaagaaactggctggcggcaggccgccccagctttcgtgccacagagatttatgcccggcgctgcaacgtccgcgacgaatatcctgcgggcgggtggtaccggaaagcagagctggcacccagtcgcacagctcaatccagcttgcggcagattgcgccacggcgctgtcctggcgagtcacatgcaggatttttgcccagaaccattcgctggaataaataccaccaatgtagcgggagtagtcaacgttgcccggcgcgtggcacaaacgggtaatctcttccgcttcttcaaccgcagtgtggtctttccacaatacgaacatcgcgttcgggttttcggcaaactccgggcgcagcgccagcacgtttccgtcggcatcaatcggtgcgggcgtgctgccggtactgtcaacgccaatcccgaccacagctgcgcgctgttcgacgctaagctctgcaagcacggttttcagtgccgcttccatactctcaatgtagtcacgcggatgatgacggaactggttattcggggcatcacaaaattgccctttctgccaacggggataccactctacgctggtggcgatctcttcaccggtagcgcagtccaccgccaaagctcgcacagaatcactgccaaaatcgaggccaattgcaatcgccatcgtttcactccatccaaaaaaacgggtatggagaaacagtagagagttgcgataaaaagcgtcaggtaggatccgctaatcttatggataaaaatgctatggcatagcaaagtgtgacgccgtgcaaataatcaatgtggacttttctgccgtgattatagacacttttgttacgcgtttttgtcatggctttggtcccgctttgttacagaatgcttttaataagcggggttaccggttgggttagcgagaagagccagtaaaagacgcagtgacggcaatgtctgatgcaatatggacaattggtttcttctctgaatggtgggagtatgaaaagtatggctgaagcgcaaaatgatcccctgctgccgggatacagctttaacgcccatctggtggcgggtttaacgccgattgaggccaacggttatctcgatttttttatcgaccgaccgctgggaatgaaaggttatattctcaatctcaccattcgcggtcagggggtggtgaaaaatcagggacgagaatttgtctgccgaccgggtgatattttgctgttcccgccaggagagattcatcactacggtcgtcatccggaggctcgcgaatggtatcaccagtgggtttactttcgtccgcgcgcctactggcatgaatggcttaactggccgagtatatttgccaatacgggtttctttcgcccggatgaagcgcaccagccgcatttcagcgacctgtttgggcaaatcattaacgccgggcaaggggaagggcgctatagcgagctgctggcgataaatctgcttgagcaattgttactgcggcgcatggaagcgattaacgagagcctccatccaccgatggataatcgggtacgcgaggcttgtcagtacatcagcgatcacctggcagacagcaattttgatatcgccagcgtcgcacagcatgtttgcttgagcccgagccgtctgagtcatcttttccgccagcagttagggattagcgtcttaagctggcgcgaggaccaacgcattagtcaggcgaagctgcttttgagcactacccggatgcctatcgccaccgtcggtcgcaatgttggttttgacgatcaactctatttcagccgagtatttaaaaaatgcaccggggccagcccgagcgagtttcgtgccggttgtgaagaaaaagtgaatgatgtagccgtcaagttgagttaattggtaacgaatcagacaattgacggcttgacggagtagcatagggtttgcagaatccctgcttcgtccatttgacaggcacattatgcaagcattgctggaacactttattacccaatccaccgtgtatagtttgatggcggtggtgttggtggcctttctggagagcctggcgctggtcggtttgattctacccggtacggtgctgatggcggggctgggagcgctgattggcagcggcgagttaagtttctggcacgcctggctggcagggattattggctgcttgatgggcgactggatttctttctggctgggttggcgttttaaaaagccgttgcatcgctggagttttctgaagaaaaacaaagcactacttgataaaactgaacatgcgttgcatcaacacagcatgttcaccattctggtcggtcgttttgttggcccgacgcgtccgctggtgccaatggtggcgggaatgctggatctgccggtggctaaatttattacgccgaatattatcggctgcctgctgtggccgccgttttacttcctgccagggattctggcgggcgcggcgatcgatattcctgccggaatgcagagcggtgagtttaaatggttgctgctggcaacagcggtgtttttgtgggttggtggctggctgtgctggcggttatggcgcagcggtaaagcgactgaccgtttgagtcattatttgtcccgcggtcgtttgttgtggctgacgccgttgatttctgccatcggcgtggtggcgctggtggtgttaattcgccacccgttgatgccggtgtatatcgatattttgcgtaaagtggttggggtttaagagatagtcttgtgcgggttgcctgatgcgacgcttgccgcgtcttatcaggcctacaaaacgcactacccgtaggtcggataaggcgttcacgccgcatccgacagtgcatattaacccgtaatccccaatagtgcgctagcactcgccttaccgctcaacaactcattggtcataccctgccaggcgatgcgcccgtcggcgactactacgctgcgcgtggcgatccgcgccgcatcttccacgctgtggctcaccatcaatagcgtcattttttgctgctggcagctcgtgctcaccagcgtcaacatctcctgacgtaacgccggatcgagcgcagagaacggttcatcgagcaataaaatcggctgttcgcgtaccagacaacgcgctaacgccactcgctgtcgctgaccgccggaaagctcgcccggtaaccgcgccattaaattatcaatccccatctggcgggcgatagcgtgcattttcccctgctgtaccgcgttcagtttcaatcccggatttagccccagcccgatgttctgtgcgaccgtcaggtggctgaacaggttgttctcctgaaacagcatgctcaccggacggcgactcggcggcatagttgtgtgatctacgccatcgatagtcaggctaccgctggctggcgtcagaaaaccggcgatcaaattcagcagggtacttttacccgcgccgcttggcccgaggatcgccacctgctcgccgcgttccaccgttaagctaaaacgcatcggcaaatggtggtaaagccaggtgatatcagtcagttttaacatttcgccccggtagtttttcaatcacggtaaacagcagaaaacagagcagcagcagaattaacgcggtgaccgcaccgtcctggctgcgataggagccaatttgctggtagagataaaacggcagggtgcggaaatcatcgttaccgaacaacgccaccacgccaaaatcaccaatgctcagcacgcatgcaaaggccagcgcctgcgccagtggacgtttcagggcgcgcagctccaccacttttaagcgactccagccttcaatccccaggctctgacataacatgctgtagcgggcggtgatatcgcgcatcgggttttccagcactttcagcgcataagggatcgccattaacgcattggtgaaaatcacaatgccgtcagcagattgtggcaggccgatagtgttgttgagcagtaaaaagaagccggtagccagcacaatccccggcatggcgaggatcaacatgccgctcatctccagcacctgacccgccagcattttctgccgcgcccgcagttcgcgactgctccatagcagcatcatggtcagcactacgcacaatacacctgccgccagcgcaatacgcaagctggtccacagcgcctgccacagcaccggttgtgccagcacttccggcaactggcgatttaccccatcgacgatcaccgccagtaacggtggcagcaacagcagcagcgccagcacaattaacaccgtgtcgcaaatgcggctatgcagacgatcgtccgggtcgcgccagccttgcagcagcgtggtgccgggcgcaatggccttactcaatcgctgactcaacagcaccagcccgaggcagcacaccatctggagcagcgccagcattgccgcgcgggcaggatcgtagtcgtaactcagcgcctgatagattgccagctcgatagtggtcgcctgcggaccgccccccaggcttagcacggtggcgaagctggcgaaacagagcataaagataagcgcagcaaccggcgggatttgtcgccgtaaccacggccattcgacgaagcggaaaaaatgccagctacgcatcccaagctgggcggcaagttgacgctgttcgccggggatgttttccagtgcctggagtaataagcggctcgccatcggcagattaaaaaacacatgggccagcaaaataccttgcaggccgtaggggctaaaggtccactccagaccgaggctttggcagagtgttgccagccagccctggcgaccatagacgctaagaatgccgaaaacagcgaccaacaccgggaggatcaaggtcattgcacacagacgcaacagcgccagccgacccggaaagcgcctgcgatagagcgcgcgggcgaggaatatcgcgggtatgacagagagcagtgcgctgagaaacgcctgccagaaggagaagcgcaccacatgccacagatagctgtcctgccagactgccacccagtcatcctgcggcgcgttccaccacagggcgagaaacgccgccagcgcaaccgctaccaccagcgtggtggcgcttacacctggaattaaccagccgggaattaacggctgacggcgcgttgccattcgctaatccatgcctgacgttgtgccgccacttcggctggcgtgaactccaacgtggttgcgggtttggtcaatttttcaaaaccggcaggcagcgtgacgtttgccaccggatacatccagttgccggttgggatcgcattctggaaagccggagaaaccataaactggaggaatttttgcgccagctccggctgcttgctggcagcggtgcgggcggcgacttccacttgcagatagtgaccttcgctgaagttcgcggcggcgtagttatctttcttctcttcgagaatgtgataagccggagaggtggtgtaactcagtaccagatcgctttcaccttttaaaaacaggccgtaggcttcgctccagcctttggtgaccgtgaccgttttcttcgccagtttctgccaggcttgtggggcgtcatcgccatagactttttgcatccatagcaacagacccagccccggtgtactggtgcgcggatcctgataaatcacccgccagttttgatcgctctcaaccagttctttcaggctttgtggcgggtttttcagtttgttcttgtcataaacgaaggcgaagtagccataatcaaacggtacgaaagtgtcattattccagccgccgggaacgttaacggcatccgctgccacaccgcttttggcaaacagtccggttttactggcggcgtctaacaggttgttatccagccccagcaccacatcggctttactgtttttgccttccatccgtagacggttgagaaggctaacgccatcttccagcgccaccagtttcagttcgcaattacagtcggcttcaaaggcttttttaaccaccggaccaggcccccagtcggcggcgaaggaatcgtaggtataaacagtcagaacgggtttagcgaaaacgggcgctgtgcacagcaacagcaggggcagacatttttttaacactttgcacctcaaaaaagagtggcaaaggacttgagaaggagcctcaaatcccttcgccggcgttatccggatcaggttcgacgggtattttctcagcgcacgcgtacgcgtggcaccccgttgagaacggcgttagtgtagtgattttgttatcaaccagcaatcatggatccggtggcgcaaaccacgcacttttaaaatcgaaccagccgagggtattcatgcgcaggccgcgcatactgcgttgcccctgaatgatcagccagtggtgcaataatggcaccatcgctttgctggcgaccagttgctggcaccagttcgccagattcatctcgccattgcgccagcgagcagcgtcggcttgccagtcaatgggaatgcaatgttgtagcagtggcacttcgcataaatgtgcgaaaacagagaagtccagcggcagggtaaagttggcgctgtttagccagatatcactttcgatctctcctgtatgccactgatcgtagtcgatctctttgattttcagcgtgacctggtgacttgccagaatctgctgcatgatcccggcaatcacccgatgctcactgtgatcctgataaaaggttagggtgaggctttccaggccagccggtttttcgctctttatggtgcgggcatggtgccaacgggggagcagtccataagccgggaaccacagttgctggtactgttcctcagcgaaatagaccagattagttggagaaagcacatagcttacccagtccctgacttgctgattcgccccgcgatgggtgcggctgtcgaacagtaaatagtagcaaccttcctccaggcggctttcaatctctttttcctcgccctgtggaccttttagcatcagccctccggctggctcgtcggcaatttccggcagaacccagacgttaacttcgtcgattaatgcccggtaaccgaagaagtcatcgaatgcctgaattttcagttgattggtgctgttgcgaatcaccgcatacggaccggtgccgatgggatggctggcaaagttactgagggtttcccattcgcgcggcaggatcatcgccggaacttgccccagcagtaacggtaaccagcggtccggttgcgtgagatggatatccagcgtccagggcgtcgggctcacaatgtcagcaatatggctatagagcggcagcgtattgattcgttttaaagaggcgatcacatcgtccatttccagttcacgaccatggtgaaaatggactcctggacgcaaaaagaaacgccagtgaagcggactaatttgctgccagtggtgggcgatgtctgcttccagttccccattttcctcatttatgcgcgttaggctactgaagatttgccgggcgatatgggtttcggaacggcgcaatgcgctgccaggtagcagattacgcaacggacgatagtagagcacgcgcaggatgtgccgcccctggcggaagctgcggcccagatgagaaaccagcatttgccgcacagtcgctttgtcgccaaccaactgcaccagttgatcgatacgatcctgctccagcaggtcttccgcccgctgttgctgaagcgccagcccggtatagaggaatgtcagacggctgcgtttaccgcgcccgacttccgcttcccacgtcagccagccgcgatcctgcatggtgttgagcagggtgcgcatatgacgacggctgcagctcaataacgctgccagttcgttgagcgttgtgtcctggcttttaccctcgcagcattgccacaggcggatgaactgttgttgcagacgagcagatggcataaaaggggaactcctgtgcaaaagacagcaattttattttccctatattaagtcaataattcctaacgatgaagcaagggggtgccccatgcgtcagttttatcagcactattttaccgcgacagcgaagttgtgctggttgcgttggttaagcgtcccacaacgattaaccatgcttgaaggactgatgcagtgggatgaccgcaattctgaaagttgacttgcctgcatcatgtgtgactgagtattggtgtaaaatcacccgccagcagattatacctgctggttttttttattctcgccgcgctaaaaagggaacgtatgatctggataatgacgatggctcgccgtatgaacggtgtttacgcggcatttatgctggtcgcttttatgatgggggtggccggggcgctacaggctcctacattgagcttatttctgagtcgtgaggttggcgcgcaacctttctggatcggcctcttttatacggtgaatgctattgctgggatcggcgtaagcctctggttggcaaaacgttctgacagtcagggcgatcggcgaaaactgattatattttgctgtttgatggctatcggcaatgcgctattgtttgcatttaatcgtcattatctgacgcttatcacctgtggtgtgcttctggcatctctggccaatacggcaatgccacagttatttgctctggcgcgggaatatgcggataacagcgcgcgagaagtggtgatgtttagcagcgtgatgcgtgcgcagctttctctggcatgggttatcggtccaccgttggcctttatgctggcgttgaattacggctttacggtgatgtttagcattgccgccgggatattcacactcagtctggtattgattgcatttatgcttccgtctgtggcgcgggtagaactgccgagcgaaaatgctttaagtatgcaaggtggctggcaggatagtaacgtacggatgttatttgtcgccagcacgttaatgtggacctgcaacaccatgtacattattgatatgccgttgtggatcagtagcgagttaggattgccagacaaactggcgggtttcctgatggggacggcagctggactggaaataccagcaatgattctggctggctactatgtcaaacgttatggtaagcggcgaatgatggtcatagcagtggcggcaggagtactgttttacaccggattgattttctttaatagccgtatggcgttgatgacgctgcaactttttaacgctgtatttatcggcattgttgcgggtattgggatgctatggtttcaggatttaatgcctggaagagcgggggcagctaccaccttatttactaacagtatttctaccggggtaattctggctggcgttattcagggagcaattgcacaaagttgggggcactttgctgtctactgggtaattgcggttatttctgttgtcgcattatttttaaccgcaaaggttaaagacgtttgatgacgtggacgatagcggaaagcccggtcatttgaccgggcaaggggattaattcataaacgcaggttgttttgcttcataagcggcaatggcgtcgtcgtgctgcaaggtaagcccaatactgtccagaccgttcatcatgcagtggcggcggaaggcatcgatggtaaagcgataggttttctctcccgctttcacctcttgcgcttccagatccacgtcgaaatggatccccggattagctttcaccagcgcaaacagttcgtccacttctgcatcgcttaatttcaccggcagcagctggttgttaaagctattgccgtagaagatgtcagcaaaactcggcgcaatcaccactttaaaaccgtagtcggtcaatgcccagggcgcgtgctcacggctagagccacagccgaagttttctcgtgccagcaaaatggaagcgccctgatactgcgggaagttcagcacgaagtccgggtttggctgttggcctttttcatccagaaaacgccagtcgttaaacagatgcgcgccaaaacccgtacgggtcactttctgcaaaaactgtttcgggatgattgcatcggtatcgacattggcggcatccagcggaaccaccaggcctgtgtgtttgataaatttctctgccatggtgtgctccttatttaatgttgcgaatgtcggcgaaatgtccggtcacagcagcagcggcagccattgccgggctgaccagatgcgtgcgcccgccgcgcccctggcggccttcaaagttacggttgctggtggaggcacaacgttcgcccggattcagacggtcgttgttcatcgccagacacatactgcagccaggcaagcgccattcaaaaccggcttcaataaagattttatccagaccttccgcttccgcctgggcttttaccgggccagagccgggaaccaccagtgcctgcacgcctggcgcgacttttcgccctttggcgatctccgctgccgcgcgtaaatcttcaatgcggctgttggtacaggaaccgataaacactttgtcgatagccacttcggtcagcggaatacccggtttcagccccatataggccagcgctttttctgcgctcgcgcgttcaaccggatcggcaaagctagccggatcgggaatattgtcgttcacggaaatcacctggccgggattggtgccccaggtgacctgcggactaatttcttctgcttgcagagtgacaacggtatcgaaagttgcgccttcgtcggtttgcagggttttccagtaggcaacggcgtcgtcgaaatctttgcctttcggcgcatgcagacggcctttgacatagttaaaggtggtttcgtccggtgcaaccagaccggcttttgcgcccatttcgattgccatattgcacagggtcatacgaccttccatgcttaaatcacggattgcttcgccgcaaaactccaccacatgcccggtgccgcctgcgctaccggttttaccgataattgccagcacgatatcttttgcggtaatgcccggcgcggctttgccctggacttcaattttcatggtttttgcgcggccctgtttcagggtttgcgttgccagtacgtgttcaacttcggaagtgccgataccaaaggccagtgcgccaaacgcgccgtgggtggcggtatggctgtcgccgcagacaatggtcatccccggcaaggtgacgccctgttccggccccattacgtggacgatcccctgatacgggtgattcaggtcatacagttcgacgccaaattctttgcagtttttgatcagttcctgcatctggatacgcgccatttcaccgcaggcattaatgtctttggtctgggtagagacgttgtgatccatggtagcgaaggttttgcccggctgacgtaccgggcgaccgtgggcgcgcagaccatcgaacgcctgcggactggtcacttcatgcaccaggtggcggtcgatatataacagtggggtttcgttttcggcttcgtacacaacgtgagcgtcgaacaatttttcgtataacgtcttagccatgattacaccccttctgctacatagcgggcaatgatatcgcccatttcatcggtactaacggcggcagcgccacgggctaaatccccggtgcgaatgccttcttctaatgcgcggttaatggcgcgttcaatggcgcaagccgcatcatcggcatccaggctgtaacgcagcagcagtgccaggctaaggatttgtgcaatcgggttggcgatgtttttgcctgcgatatctggtgcgctgccgcccgccggttcatacagtccaaaaccttgctcgttcaggctggcggaaggcaacatccccatgctgccagtgatcattgcgcactcgtcagacagaatgtcgccaaacaggttggagcacagcagaacgtcaaactgacttggatctttaatcagctgcatggtggcgttgtcgatgtacatatgcgccagttcgacatccgggtattccgtggcgatctcgttaacgatctcccgccataaaatagaggattgcagcacgttggctttatcgatgctcgtcactttgtggcgacgcttgcgagcagattcaaacgcgatgcgggcgatacgttcgatctcaaaacggtgatacacctcggtatcaaaggctttttcatattgtccgctaccttcgcggccttttggctgaccgaaatagatgccgccggtcagttcgcgcacacacaggatgtcgaagccgtttgcggcaatgtctgcacgcagcggacagaatgcttccagcccctgatacagttttgccgggcgcaggttgctgaataatttgaagtgcttacgcagaggcagcagcgcgccgcgttctggttgctggtctggtggtaaatgttcccacttcgggccgcctacgctgccaaacagcacggcatcggcttgctcacaaccttcaaccgtcgcaggcggcagtggttgcccgtggttatcaatggctgcgccgcctacatcgtaatggctggtggtgatgcgcatcgcaaagcggttgcgcacggcatccagcactttcagcgcctgggtcatcacttccggaccaataccgtcccccggcaatacggcaatatggtaattcttgctcatcacacggtttccttgttgttttcgttgtgttgagctttgcgttgcaactctttttcgacttctgcggcacgccagatattgttcagaacgtgcaccatggctttggcagaactctcgacaatatcggtagccaggccgacgccgtggaagcggcgaccgttgtagttagcgacgatatccacctgacccagcgcatctttaccgtggcctttggcggtcaggctgtatttcaccagttcgacgttatattcagtgatgcggttaattgcctgatagacggcatcgaccggaccgttaccgttggcggcttctgctttgacttcttcgccacaggccagtttgacggcggcggtggcgatatcgttagagccagactgcacgctgaagtaatccagacggaaatgctccggctcttcttgctgcttaccgatgaaggccagcgcctccagatcgtaatcaaacacctgaccttttttgtccgccagcttcaggaaagcatcgtacaaattgtctaaattatattcactttctttataccccatctcatccatgcgatgtttcaccgccgcacgcccgctacgagaggtcagattcagctggatttggttcagaccaatagattctggtgtcatgatttcgtagttttcgcggtttttcagcacgccatcctggtgtataccggaggagtgtgcgaatgcgccgctgccaacaatggctttgtttgccgggatcggcatattacaaatctggctaactaactggctggtgcgccatatctcctggtgattaatggcggtgtggacgttgagaatatccttacgaactttgatcgccatgatgacttcttccagggaacagtttccggcacgctcgccgatcccgttcattgcgccttccacctggcgtgcaccggcatgtaccgccgccagactgtttccgaccgccaggcccaaatcgtcgtgggtatgtacggagataatggctttgtcgatgttaggcacgcgttcatacaggccgctgatgattccggcgaactcaaacggcatggtgtagcccacggtgtccggaatgttgatggtggtggcaccggcattaatcgccgcttcgaccactcgcgccagatcggcaatgggtgtacgcccggcatcttcgcaagaaaattcaacatcatcggtgtaattacgggcgcgtttcaccatatagatagcgcgttcgatcacctcgtccagcgtgctgcgcagcttggtggcgatgtgcattgggctagtggcaataaaggtatgaatacggaaggcttcggcgactttcagggattcggccgccacgtcgatatctttttccacgcagcgagctaacgcacatacgcggctgtttttaacctggcgggcgatggtttgcacgctttcaaaatcgcccgggctagagacggggaaaccgacttccatcacgtcaacacccatacgctcaagggccagcgcaatttgcagtttttctttcacactcaagcttgcctgtaacgcctgttcaccgtcgcgcaatgtggtatcgaaaataatgacttgctggctcatggtttgggtccttgtctcttttagagcgcctcgcttcgggcataaaaaaacccgcgcaatggcgcgggttttttgtttgactgcgtgctggcttaatgctggatgccgctcactcgtctaccgcgcaaagaagatgcgtttagtagtagtagaccgataaagcgaacgatgtgagtcattaaatcagctccagatgaatgcgatatgcttttagagttactggatacaaaaacggatgtcaaccctgacgcaataaaaacgtcccgccagcgtgagttctgcatccgtaaaattagctaattgtgctgcggtggttaaagtaagcgatattaatttctgcttaactaccgacgcttttcatcggttgacatatttcagcataaatttttgcatctaatcaacgaggaaaaaggggacaaaatgcacgcgttgcaaaacctatcctgatgatttgtattgaattatatgttttgcgattttttttgatattgatttggtgaatattattgatcaattaatgttaagaattaatgcattaaatatataaattaattattaaataagcacatttaatccattttgtagatgattgagtattcgcggtagttatgattagattgttttcgcaacaaaaacattatggattattatgctgtggtaaatgactcattccacggcaatggattctgtttttatcagaacccgtatctttatgttttccgaattttactcattttgctttttcttattttatatgcatgataaatcatattcttcaggattatttctctgcattccaataagggaaagggagttaagtgtgacagtggagttaagtatgccagaggtacaaacagatcatccagagacggcggagttaagcaaaccacagctacgcatggtcgatctcaacttattaaccgttttcgatgccgtgatgcaggagcaaaacattactcgtgccgctcatgttctgggaatgagccaacctgcggtcagtaacgctgttgcacgcctgaaggtgatgtttaatgacgagctttttgttcgttatggccgtggtattcaaccgactgctcgcgcatttcaactttttggtagtgttcgtcaggcattgcaactagtacaaaatgaattgcctggtagtggttttgaacccgcgagcagtgaacgtgtatttcatctttgtgtttgcagcccgttagacagcattctgaccagccagatttataatcacattgagcagattgcgccaaatatacatgttatgttcaagtctagtttaaatcagaacactgaacatcagctgcgttatcaggaaacggagtttgtgattagttatgaagacttccatcgtcctgaatttaccagcgtaccattatttaaagatgaaatggtgctggtagccagcaaaaatcatccaacaattaagggcccgttactgaaacatgatgtttataacgaacaacatgcggcggttagcctcgatcgtttcgcgagttttagtcaaccttggtatgacacggtagataagcaagccagtatcgcgtatcagggcatggcaatgatgagcgtacttagcgtggtgagccaaacgcatttggtcgctattgcgccgcgttggctggctgaagagttcgctgaatccttagaattacaggtattaccgctgccgttaaaacaaaacagcagaacctgttatctctcctggcatgaagctgccgggcgcgataaaggccatcagtggatggaagagcaattagtcagtatttgcaaacgctaactgattgcagaataggtcagacatgaatgtctggtttattctgcattttttattgaatgtagaattttattctgaatgtgtgggctctctattttaggattaattaaaaaaatagagaaattgctgtaagttgtgggattcagccgatttattatcaatttaatcctctgtaatggaggattttatcgtttcttttcacctttcctcctgtttattcttattaccccgtgtttatgtctctggctgccaattgcttaagcaagatcggacggttaatgtgttttacacattttttccgtcaaacagtgaggcaggccatggagatgttgtctggagccgagatggtcgtccgaagccttatcgatcagggcgttaaacaagtattcggttatcccggaggcgcagtccttgatatttatgatgcattgcataccgtgggtggtattgatcatgtattagttcgtcatgagcaggcggcggtgcatatggccgatggcctggcgcgcgcgaccggggaagtcggcgtcgtgctggtaacgagcggtccaggggcgaccaatgcgattactggcatcgccaccgcttatatggattccattccattagttgtcctttccgggcaggtagcgaccagcttgataggttacgatgcctttcaggagtgcgacatggtggggattagccgaccggtggttaaacacagttttctggttaagcaaacggaagacattccgcaggtgctgaaaaaggctttctggctggcggcaagtggtcgcccaggaccagtagtcgttgatttaccgaaagatattcttaatccggcgaacaaattaccctatgtctggccggagagcgtcagtatgcgttcttacaatcccactactaccggacataaagggcaaattaagcgtgctctgcaaacgctggtagcggcaaaaaaaccggttgtctacgtaggcggtggggcaatcacggcgggctgccatcagcagttgaaagaaacggtggaggcgttgaatctgcccgttgtttgcagtttgatggggctgggggcgtttccggcaacgcatcgtcaggcactgggcatgctgggaatgcacggtacctacgaagccaatatgacgatgcataacgcggatgtgattttcgccgtcggggtacgatttgatgaccgaacgacgaacaatctggcaaagtactgcccaaatgccactgttctgcatatcgatattgatcctacttccatttctaaaaccgtgactgcggatatcccgattgtgggggatgctcgccaggtcctcgaacaaatgcttgaactcttgagccaagaatccgcccatcaaccactggatgagatccgcgactggtggcagcaaattgaacagtggcgcgctcgtcagtgcctgaaatatgacactcacagtgaaaagattaaaccgcaggcggtgatcgagactctttggcggttgacgaagggagacgcttacgtgacgtccgatgtcgggcagcaccagatgtttgctgcactttattatccattcgacaaaccgcgtcgctggatcaattccggtggcctcggcacgatgggttttggtttacctgcggcactgggcgtcaaaatggcgttgccagaagaaaccgtggtttgcgtcactggcgacggcagtattcagatgaacatccaggaactgtctaccgcgttgcaatacgagttgcccgtactggtggtgaatctcaataaccgctatctggggatggtgaagcagtggcaggacatgatctattccggccgtcatagtcaatcttatatgcaaagcctacccgatttcgtccgtctggcggaagcctatgggcatgtcgggatccagatttctcatccgcatgagctggaaagcaaacttagcgaggcgctggaacaggtgcgcaataatcgcctggtgtttgttgatgttaccgtcgatggcagcgagcacgtctacccgatgcagattcgcgggggcggaatggatgaaatgtggttaagcaaaacggagagaacctgattatgcgccggatattaagtgtcttactcgaaaatgaaagtggcgcgttatcccgcgtgattggccttttttcccagcgtggctacaacattgaaagcctgaccgttgcgccaaccgacgatccgacattaagccgtatgaccatccagaccgtgggcgatgaaaaagtacttgagcagatcgaaaagcaattacacaaactggtcgatgtcttgcgcgtgagtgagttggggcagggcgcgcatgttgagcgggaaatcatgctggtgaaaattcaggccagcggttacgggcgtgacgaagtgaaacgtaatacggaaatattccgtgggcaaattatcgatgtcacacccagcctttataccgttcaattagcaggcaccagcggtaagcttgatgcatttttagcaagcattcgcgatgtggcgaaaattgtggaggttgctcgctctggtgtggtcggacttagccgcggcgataaaataatgcgttgagaatgatctcaatgcgcaatttacagcccaacatgtcacgttgggctttttttgcgaaatcagtgggaacctggaataaaagcagttgccgcagttaattttctgcgcttagatgttaatgaatttaacccataccagtacaatggctatggtttttacattttacgcaaggggcaattgtgaaactggatgaaatcgctcggctggcgggagtgagccggaccactgcaagctatgttattaacggcaaagcgaagcaataccgtgtgagcgacaaaaccgttgaaaaagtcatggctgtggtgcgtgagcacaattaccacccgaacgccgtggcagctgggcttcgtgctggacgcacacgttctattggtcttgtgatccccgatctggagaacaccagctatacccgcatcgctaactatcttgaacgccaggcgcggcaacggggttatcaactgctgattgcctgcagtgaagatcagccagacaacgaaatgcggtgcattgagcaccttttacagcgtcaggttgatgccattattgttagcacgagcttgcctcctgagcatcctttttatcaacgctgggctaacgacccgttcccgattgtcgcgctggaccgcgccctcgatcgtgaacacttcaccagcgtggttggtgccgatcaggatgatgccgaaatgctggcggaagagttacgtaagtttcccgccgagacggtgctttatcttggtgcgctaccggagctttctgtcagcttcctgcgtgaacaaggtttccgtactgcctggaaagatgatccgcgcgaagtgcatttcctgtatgccaacagctatgagcgggaggcggctgcccagttattcgaaaaatggctggaaacgcatccgatgccgcaggcgctgttcacaacgagctttgcgttgttgcaaggagtgatggatgtcacgctgcgtcgcgacggcaaactgccttctgacctggcaattgccacctttggcgataacgaactgctcgacttcttacagtgtccggtgctggcagtggctcaacgtcaccgcgatgtcgcagagcgtgtgctggagattgtcctggcaagcctggacgaaccgcgtaagccaaaacctggtttaacgcgcattaaacgtaatctctatcgccgcggcgtgctcagccgtagctaagccgcgaacaaaaatacgcgccaggtgaatttccctctggcgcgtagagtacgggactggacatcaatatgcttaaagtaaataagactattcctgactattattgataaatgcttttaaacccgcccgttaattaactcaccagctgaaattcacaataattaagtgatatcgacagcgcgtttttgcattattttgttacatgcggcgatgaattgccgatttaacaaacacttttctttgcttttgcgcaaacccgctggcatcaagcgccacacagacgtaacaaggactgttaaccggggaagatatgtcctaaaatgccgctcgcgtcgcaaactgacactttatatttgctgtggaaaatagtgagtcattttaaaacggtgatgacgatgagggattttttcttacagctattcataacgttaatttgcttcgcacgttggacgtaaaataaacaacgctgatattagccgtaaacatcgggttttttacctcggtatgccttgtgactggcttgacaagcttttcctcagctccgtaaactcctttcagtgggaaattgtggggcaaagtgggaataaggggtgaggctggcatgttccggggagcaacgttagtcaatctcgacagcaaagggcgcttaagtgtgcctacccgttatcgggaacagctgcttgagaacgctgccggtcaaatggtttgcaccattgacatttatcacccgtgcctgctgctttaccccctgcctgaatgggaaattatcgagcaaaaattaagccgtctgagcagcatgaacccggttgagcgccgtgtgcagcgcctactgttaggtcatgccagcgaatgtcagatggatggcgcaggtcgattgttaatcgcgccagtactgcggcaacatgccgggctgacaaaagaagtgatgctggttggacagttcaacaagtttgagctgtgggatgaaacaacctggcatcaacaggtcaaggaagatatcgacgcagagcagttggctaccggagacttaagcgagcgactgcaggacttgtctctataaaatgatggaaaactataaacatactacggtgctgctggatgaagccgttaatggcctcaatatccgtcctgatggcatctacattgatgggacttttggtcgcggtggtcacagtcgtctgatcctcagccagcttggcgaagaggggcgtttgctggcgatcgatcgcgacccgcaggctatcgccgttgcgaagactattgatgatccgcgcttctccatcatccacggacctttctccgcgctgggcgaatacgttgccgagcgcgatcttatcggcaagatcgacggcattctcctcgatcttggcgtctctagtccgcaacttgatgatgctgaacgtggcttttcctttatgcgcgatggtccgctggacatgcgtatggacccaacccgtgggcagagtgccgctgaatggctacaaaccgcagaagaagccgatatcgcctgggtattgaaaacctatggtgaagagcgttttgccaaacgcattgcccgcgccattgtcgagcgtaaccgcgaacagccgatgacccgcaccaaagaactggcggaagtcgtggctgctgcaacgccggtgaaagataagtttaaacatcccgcgacccgtaccttccaggcggtgcgcatttgggtaaacagtgaactggaggagatagagcaggcgctaaaaagcagcctcaacgtgctggccccgggtgggcggcttagcatcatcagcttccacagcctggaagaccgtattgtgaaacgttttatgcgtgaaaacagccgcggtccgcaagttccggcagggttaccgatgactgaagagcagctcaaaaaactgggtggccgtcagctgcgagcactaggcaagttaatgccgggcgaagaagaggtggctgagaaccctcgtgcccgtagtagtgttctgcgtattgcagagaggacgaatgcatgatcagcagagtgacagaagctctaagcaaagttaaaggaagcatgggaagccacgagcgccatgcattgcctggtgttatcggtgacgatcttttgcgatttgggaagctgccactctgcctgttcatttgcattattttgacggcggtgactgtggtaaccacggcgcaccatacccgtttactgaccgctcagcgcgaacaactggtgctggagcgagatgctttagacattgaatggcgcaacctgatccttgaagagaatgcgctcggcgaccatagccgggtggaaaggatcgccacggaaaagctgcaaatgcagcatgttgatccgagtcaagaaaatatcgtagtgcaaaaataaggataaacgcgacgcatgaaagcagcggcgaaaacgcagaaaccaaaacgtcaggaagaacatgccaactttatcagttggcgttttgcgttgttatgcggctgtattctcctggcgctggcttttctgctcggacgcgtagcgtggttacaagttatctccccggatatgctggtgaaagagggcgacatgcgttctcttcgcgttcagcaagtttccacctcccgcggcatgattactgaccgttctggtcgcccgttagcggtgagcgtgccggtaaaagcgatttgggctgacccgaaagaagtgcatgacgctggcggtatcagcgtcggtgaccgctggaaggcgctggctaacgcgctcaatattccgctggatcagcttagtgcccgcattaacgccaacccgaaagggcgctttatttatctggcgcgtcaggtgaaccctgacatggcggactacatcaaaaaactgaaactgccggggattcatctgcgtgaagagtctcgccgttactatccgtccggcgaagtgactgctcacctcatcggctttactaacgtcgatagtcaagggattgagggcgttgagaagagtttcgataaatggcttaccgggcagccgggtgagcgcattgtgcgtaaagaccgctatggtcgcgtaattgaagatatttcttctactgacagccaggcagcgcacaacctggcgctgagtattgatgaacgcctgcaggcgctggtttatcgcgaactgaacaacgcggtggcctttaacaaggctgaatctggtagcgccgtgctggtggatgtcaacaccggtgaagtgctggcgatggctaacagcccgagttacaaccctaacaatctgagcggcacgccgaaagaggcgatgcgtaaccgtaccatcaccgacgtgtttgaaccgggcagtacggttaaaccgatggtggtaatgaccgcgttgcaacgtggcgtggtgcgggaaaacagcgtactcaataccattccttatcgaattaacggccacgaaatcaaagacgtggcacgctacagcgaattaaccctgaccggggtattacagaagagcagtaacgtcggtgtttccaagctggcgttagcgatgccgtccagtgcgttagtagatacttacagtcgttttggactgggaaaagcgaccaatttggggttggtcggagaacgcagtggcttatatcctcaaaaacaacggtggtctgacatagagagggccaccttctctttcggctacgggctaatggtaacaccattacagttagcgcgagtctacgcaactatcggcagctacggcatttatcgcccactgagcattaccaaagttgaccccccggttcccggtgaacgtgtcttcccggaatccattgtccgcactgtggtgcatatgatggaaagcgtggcgctaccaggcggcggcggcgtgaaggcggcgattaaaggctatcgtatcgccattaaaaccggtaccgcgaaaaaggtcgggccggacggtcgctacatcaataaatatattgcttataccgcaggcgttgcgcctgcgagtcagccgcgcttcgcgctggttgttgttatcaacgatccgcaggcgggtaaatactacggcggcgccgtttccgcgccggtctttggtgccatcatgggcggcgtattgcgtaccatgaacatcgagccggatgcgctgacaacgggcgataaaaatgaatttgtgattaatcaaggcgaggggacaggtggcagaagctaaagcctgagcgcttcgcgctggttgttgttatcaacgatccgcaggcgggtaaatactacggcggcgccgtttccgcgccggtctttggtgccatcatgggcggcgtattgcgtaccatgaacatcgagccggatgcgctgacaacgggcgataaaaatgaatttgtgattaatcaaggcgaggggacaggtggcagatcgtaatttgcgcgaccttcttgctccgtgggtgccagacgcacctagccgagcactgcgagagatgacactcgacagccgtgtggctgcggcgggcgatctctttgtagctgtagtaggtcatcaggcggacgggcgtcgatatatcccgcaggcgatagcgcaaggtgtggctgccattattgcagaggcgaaagatgaggcgaccgatggtgaaatccgtgaaatgcacggcgtaccggtcatctatctcagccagctcaacgagcgtttatctgcactggcgggccgcttttaccatgaaccctctgacaatttacgtctcgtgggcgtaacgggcaccaacggcaaaaccacgactacccagctgttggcgcagtggagccaactgcttggcgaaatcagcgcggtaatgggcaccgttggtaacggcctgctggggaaagtgatcccgacagaaaatacaaccggtagcgcagtcgatgttcagcatgagctggcggggctggtggatcagggcgcgacgttttgcgcaatggaagtttcctcccacgggctggtacagcaccgtgtggcggcattgaaatttgcggcgagcgtctttaccaacttaagccgcgatcaccttgattatcatggtgatatggaacactacgaagccgcgaaatggctgctttattctgagcatcattgcggtcaggcgattattaacgccgacgatgaagtgggccgccgctggctggcaaaactgccggacgcggttgcggtaagtatggaagatcatattaatccgaactgtcacggacgctggttgaaagcgaccgaagtgaactatcacgacagcggtgcgacgattcgctttagcagtagttggggcgatggcgaaattgaaagccatctgatgggcgcttttaacgtcagcaacctgctgctcgcgctggcgacactgttggcactcggctatccactggctgatctgctgaaaaccgccgcgcgtctgcaaccggtttgcggacgtatggaagtgttcactgcgccaggcaaaccgacggtggtggtggattacgcgcatacgccggatgcactggaaaaagccttacaggcggcgcgtctgcactgtgcgggcaagctgtggtgtgtctttggctgtggtggcgatcgcgataaaggtaagcgtccactgatgggcgcaattgccgaagagtttgctgacgtggcggtggtgacggacgataacccgcgtaccgaagaaccgcgtgccatcatcaacgatattctggcgggaatgttagatgccggacatgccaaagtgatggaaggccgtgctgaagcggtgacttgcgccgttatgcaggctaaagagaatgatgtggtactggtcgcgggcaaaggccatgaagattaccagattgttggcaatcagcgtctggactactccgatcgcgtcacggtggcgcgtctgctgggggtgattgcatgattagcgtaacccttagccaacttaccgacattctcaacggtgaactgcaaggtgcagatatcacccttgatgctgtaaccactgatacccgaaaactgacgccgggctgcctgtttgttgccctgaaaggcgaacgttttgatgcccacgattttgccgaccaggcgaaagctggcggcgcaggcgcactactggttagccgtccgctggacatcgacctgccgcagttaatcgtcaaggatacgcgtctggcgtttggtgaactggctgcatgggttcgccagcaagttccggcgcgcgtggttgctctgacggggtcctccggcaaaacctccgttaaagagatgacggcggcgattttaagccagtgcggcaacacgctttatacggcaggcaatctcaacaacgacatcggtgtaccgatgacgctgttgcgcttaacgccggaatacgattacgcagttattgaacttggcgcgaaccatcagggcgaaatagcctggactgtgagtctgactcgcccggaagctgcgctggtcaacaacctggcagcggcgcatctggaaggttttggcagccttgcgggtgtcgcgaaagcgaaaggtgaaatctttagcggcctgccggaaaacggtatcgccattatgaacgccgacaacaacgactggctgaactggcagagcgtaattggcagtcgcaaagtgtggcgtttcagtcccaatgccgccaacagcgatttcaccgccaccaatatccatgtgaccagccacggtacggaatttaccctacaaaccccaaccggtagcgtcgatgttctgctgccgttgccggggcgtcacaatattgcgaatgcgctggcagccgctgcgctctccatgtccgtgggcgcaacgcttgatgctatcaaagcggggctggcaaatctgaaagctgttccaggccgtctgttccccatccaactggcagaaaaccagttgctgctcgacgactcctacaacgccaatgtcggtagtatgactgcagcagtccaggtactggctgaaatgccgggctaccgcgtgctggtggtgggcgatatggcggaactgggcgctgaaagcgaagcctgccatgtacaggtgggcgaggcggcaaaagctgctggtattgaccgcgtgttaagcgtgggtaaacaaagccatgctatcagcaccgccagcggcgttggcgaacattttgctgataaaactgcgttaattacgcgtcttaaattactgattgctgagcaacaggtaattacgattttagttaagggtagtcgtagtgccgccatggaagaggtagtacgcgctttacaggagaatgggacatgttaatataagctttacaggagaatgggacatgttagtttggctggccgaacatttggtcaaatattattccggctttaacgtcttttcctatctgacgtttcgcgccatcgtcagcctgctgaccgcgctgttcatcagtttgtggatgggcccgcgtatgattgctcatttgcaaaaactttcctttggtcaggtggtgcgtaacgacggtcctgaaagtcacttcagcaagcgcggtacgccgaccatgggcgggattatgatcctgacggcgattgtgatctccgtactgctgtgggcttacccgtccaatccgtacgtctggtgcgtgttggtggtgctggtaggttacggtgttattggctttgttgatgattatcgcaaagtggtgcgtaaagacaccaaagggttgatcgctcgttggaagtatttctggatgagcgtcattgcgctgggtgtcgccttcgccctgtaccttgccggcaaagacacgcccgcaacgcagctggtggtcccattctttaaagatgtgatgccgcagctggggctgttctacattctgctggcttacttcgtcattgtgggtactggcaacgcggtaaacctgaccgatggtctcgacggcctggcaattatgccgaccgtatttgtcgccggtggttttgcgctggtggcgtgggcgaccggcaatatgaactttgccagctacttgcatataccgtatctgcgacacgccggggaactggttattgtctgtaccgcgatagtcggggcaggactgggcttcctgtggtttaacacctatccggcgcaggtctttatgggcgatgtaggtagcctggcgttaggtggtgcgttaggcattatcgccgtactgctacgtcaggaattcctgctggtgattatggggggcgtgttcgtggtagaaacgctttctgtcatcctgcaggtcggctcctttaaactgcgcggacaacgtattttccgcatggcaccgattcatcaccactatgaactgaaaggctggccggaaccgcgcgtcattgtgcgtttctggattattagcctgatgctggttctgattggtctggcaacgctgaaggtacgttaatcatggctgattatcagggtaaaaatgtcgtcattatcggcctgggcctcaccgggctttcctgcgtggactttttcctcgctcgcggtgtgacgccgcgcgttatggatacgcgtatgacaccgcctggcctggataaattacccgaagccgtagaacgccacacgggcagtctgaatgatgaatggctgatggcggcagatctgattgtcgccagtcccggtattgcactggcgcatccatccttaagcgctgccgctgatgccggaatcgaaatcgttggcgatatcgagctgttctgtcgcgaagcacaagcaccgattgtggcgattaccggttctaacggcaaaagcacggtcaccacgctagtgggtgaaatggcgaaagcggcgggggttaacgttggtgtgggtggcaatattggcctgcctgcgttgatgctactggatgatgagtgtgaactgtacgtgctggaactgagcagcttccagctggaaaccacctccagcttacaggcggtagcagcgaccattctgaacgtgactgaagatcatatggatcgctatccgtttggtttacaacagtatcgtgcagcaaaactgcgcatttacgaaaacgcgaaagtttgcgtggttaatgctgatgatgccttaacaatgccgattcgcggtgcggatgaacgctgcgtcagctttggcgtcaacatgggtgactatcacctgaatcatcagcagggcgaaacctggctgcgggttaaaggcgagaaagtgctgaatgtgaaagagatgaaactttccgggcagcataactacaccaatgcgctggcggcgctggcgctggcagatgctgcagggttaccgcgtgccagcagcctgaaagcgttaaccacattcactggtctgccgcatcgctttgaagttgtgctggagcataacggcgtacgttggattaacgatagcaaagcgaccaacgtcggcagtacggaagcggcgctgaatggcctgcacgtagacggcacactgcatttgttgctgggtggcgatggtaaaagcgcggactttagcccactggcgcgttacctgaatggcgataacgtacgtctgtattgtttcggtcgtgacggcgcgcagctggcggcgctacgcccggaagtggcagaacaaaccgaaactatggaacaggcgatgcgcttgctggctccgcgtgttcagccgggcgatatggttctgctctccccagcctgtgccagccttgatcagttcaagaactttgaacaacgaggcaatgagtttgcccgtctggcgaaggagttaggttgatgcgtttatctctccctcgcctgaaaatgccgcgcctgccaggattcagtatcctggtctggatctccacggcgctaaagggctgggtgatgggcagccgggaaaaagataccgacagcctgatcatgtacgatcgcaccttactgtggctgaccttcggcctcgcggcgattggctttatcatggtgaccagcgcgagtatgcccatagggcaacgcttaaccaacgatccgttcttcttcgcgaagcgtgatggtgtctatctgattttggcgtttattctggcgatcattacgctgcgtctgccgatggagttctggcaacgctacagtgccacgatgctgctcggatctatcatcctgctgatgatcgtcctggtagtgggtagcagcgttaaaggggcaagccgttggatcgatctcggtttgctgcgtatccagcctgcggagctgacaaaactgagcctgttttgctatatcgccaactatctggtgcgtaaaggcgacgaagtacgtaataacctgcgcggcttcctgaaaccgatgggcgtgattctggtgttggcagtgttactgctggcacagccagaccttggtacggtggtggtgttgtttgtgactacgctggcgatgttgttcctggcgggagcgaaattgtggcagttcattgccattatcggtatgggcattagtgcggttgtgttgctgatactcgccgaaccgtaccgtatccgccgtgttaccgcattctggaacccgtgggaagatccctttggcagcggctatcagttaacgcaaagcctgatggcgtttggtcgcggcgaactttgggggcaaggtttaggtaacagcgtacaaaaactggagtatctgccggaagcgcacactgactttattttcgccattatcggcgaagaactggggtatgtcggtgtggtgctggcacttttaatggtattcttcgtcgcttttcgcgcgatgagcattggccgtaaagcattagaaattgaccaccgtttttccggttttctcgcctgttctattggcatctggtttagcttccaggcgctggttaacgtaggcgcggcggcggggatgttaccgaccaaaggtctgacattgccgctgatcagttacggtggtagcagcttactgattatgagcacagccatcatgatgctgttgcgtattgattatgaaacgcgtctggagaaagcgcaggcgtttgtacgaggtagtcgatgagtggtcaaggaaagcgattaatggtgatggcaggcggaaccggtggacatgtattcccgggactggcggttgcgcaccatctaatggctcagggttggcaagttcgctggctggggactgccgaccgtatggaagcggacttagtgccaaaacatggcatcgaaattgatttcattcgtatctctggtctgcgtggaaaaggtataaaagcactgatagctgccccgctgcgtatcttcaacgcctggcgtcaggcgcgggcgattatgaaagcgtacaaacctgacgtggtgctcggtatgggaggctacgtgagtggtccaggtggtctggccgcgtggagcttaggcattccggttgtacttcatgaacaaaacggtattgcgggcttaaccaataaatggctggcgaagattgccaccaaagtgatgcaggcgtttccaggtgctttccctaatgcggaagtagtgggtaacccggtgcgtaccgatgtgttggcgctgccgttgccgcagcaacgtttggctggacgtgaaggtccggttcgtgtgctggtagtgggtggttctcagggcgcacgcattcttaaccagacaatgccgcaggttgctgcgaaactgggtgatagtgtcactatctggcatcagagcggcaaaggtagccaacaatccgttgaacaggcgtatgccgaagcggggcaaccgcagcataaagtgacggaatttattgatgatatggcggcggcgtatgcgtgggcggatgtcgtcgtttgccgctccggtgcgttaacggtgagtgaaatcgccgcggcaggactaccggcgttgtttgtgccgtttcaacataaagaccgccagcaatactggaatgcgctaccgctggaaaaagcgggcgcagccaaaattatcgagcagccacagcttagcgtggatgctgtcgccaacaccctggccgggtggagccgagaaaccttattaaccatggcagaacgcgcccgcgctgcatccattccggatgccaccgagcgagtggcaaatgaagtgagccgggttgcccgggcgtaattgtagcgatgccttttgcatcgtatgaatttaagaagttaatggcgtaaagaatgaatacacaacaattggcaaaactgcgttccatcgtgcccgaaatgcgtcgcgttcggcacatacattttgtcggcattggtggtgccggtatgggcggtattgccgaagttctggccaatgaaggttatcagatcagtggttccgatttagcgccaaatccggtcacgcagcagttaatgaatctgggtgcgacgatttatttcaaccatcgcccggaaaacgtacgtgatgccagcgtggtcgttgtttccagcgcgatttctgccgataacccggaaattgtcgccgctcatgaagcgcgtattccggtgatccgtcgtgccgaaatgctggctgagttaatgcgttttcgtcatggcatcgccattgccggaacgcacggcaaaacgacaaccaccgcgatggtttccagcatctacgcagaagcggggctcgacccaaccttcgttaacggcgggctggtaaaagcggcgggggttcatgcgcgtttggggcatggtcggtacctgattgccgaagcagatgagagtgatgcaagcttcctgcatctgcaaccgatggtggcgattgtcaccaatatcgaagccgaccacatggatacctaccagggcgactttgagaatttaaaacagacttttattaattttctgcacaacctgccgttttacggtcgtgcggtgatgtgtgttgatgatccggtgatccgcgaattgttaccgcgagtggggcgtcagaccacgacttacggcttcagcgaagatgccgacgtgcgtgtagaagattatcagcagattggcccgcaggggcactttacgctgctgcgccaggacaaagagccgatgcgcgtcaccctgaatgcgccaggtcgtcataacgcgctgaacgccgcagctgcggttgcggttgctacggaagagggcattgacgacgaggctattttgcgggcgcttgaaagcttccaggggactggtcgccgttttgatttcctcggtgaattcccgctggagccagtgaatggtaaaagcggtacggcaatgctggtcgatgactacggccaccacccgacggaagtggacgccaccattaaagcggcgcgcgcaggctggccggataaaaacctggtaatgctgtttcagccgcaccgttttacccgtacgcgcgacctgtatgatgatttcgccaatgtgctgacgcaggttgataccctgttgatgctggaagtgtatccggctggcgaagcgccaattccgggagcggacagccgtagcctgtgtcgcacaattcgtggacgtgggaaaattgatcccattctggtgccggatccggcgcgggtagccgagatgctggcaccggtattaaccggtaacgacctgattctcgttcagggggctggtaatattggaaaaattgcccgttctttagctgaaatcaaactgaagccgcaaactccggaggaagaacaacatgactgataaaatcgcggtcctgttgggtgggacctccgctgagcgggaagtttctctgaattctggcgcagcggtgttagccggactgcgtgaaggcggtattgacgcgtatcctgtcgacccgaaagaagtcgacgtgacgcaactgaagagcatgggctttcagaaagtgtttatcgcgctacacggtcgcggcggtgaagatggtacgctgcaggggatgctcgagctgatgggcttgccttataccggaagcggagtgatggcatctgcgcttagtatggataaactacgcagcaaacttctatggcaaggtgccggtttaccggtcgcgccgtgggtagcgttaacccgcgcagagtttgaaaaaggcctgagcgataagcagttagcagaaatttctgctctgggtttgccggttatcgttaagccgagccgcgaaggttccagtgtgggaatgagtaaagtagtagcagaaaatgctctacaagatgcattaagattggcatttcagcacgatgaagaagtattgattgaaaaatggctaagtgggccggagttcacggttgcgatactcggtgaagaaattttaccgagtatacgtattcaaccgtccggaaccttctatgattatgaggcgaagtatctctctgatgagacacagtatttctgccccgcaggtctggaagcgagtcaagaggccaatttgcaggcattagtgctgaaagcatggacgacgttaggttgcaaaggatggggacgtattgacgttatgctggacagcgatggacagttttatctgctggaagccaataccagtccgggtatgaccagccacagcctggtgccgatggcggcacgtcaggcaggtatgagcttcagccagttggtagtacgaattctggaactggcggactaatatgagccaggctgctctgaacacgcgaaacagcgaagaagaggtttcttctcgccgcaataatggaacgcgtctggcggggatccttttcctgctgaccgttttaacgacagtgttggtgagcggctgggtcgtgttgggctggatggaagatgcgcaacgcctgccgctcagtaagctggtgttgaccggtgaacgccattacacacgtaatgacgatatccggcagagcatcctggcattgggtgagccgggtacctttatgacccaggatgtcaacatcatccagacgcaaatagaacaacgcctgccgtggattaagcaggtgagcgtcagaaagcagtggcctgatgaattgaagattcatctggttgaatatgtgccgattgcgcggtggaatgatcaacatatggtagacgcggaaggaaataccttcagcgtgccgccagaacgcaccagcaagcaggtgcttccaatgctgtatggcccggaaggcagcgccaatgaagtgttgcagggctatcgcgaaatggggcagatgctggcaaaggacagatttactctgaaggaagcggcgatgaccgcgcggcgttcctggcagttgacgctgaataacgatattaagctcaatcttggccggggcgatacgatgaaacgtttggctcgctttgtagaactttatccggttttacagcagcaggcgcaaaccgatggcaaacggattagctacgttgatttgcgttatgactctggagcggcagtaggctgggcgcccttgccgccagaggaatctactcagcaacaaaatcaggcacaggcagaacaacaatgatcaaggcgacggacagaaaactggtagtaggactggagattggtaccgcgaaggttgccgctttagtaggggaagttctgcccgacggtatggtcaatatcattggcgtgggcagctgcccgagccgtggtatggataaaggcggggtgaacgacctcgaatccgtggtcaagtgcgtacaacgcgccattgaccaggcagaattgatggcagattgtcagatctctagcgtatatctggcgctttctggtaagcacatcagctgccagaatgaaattggtatggtgcctatttctgaagaagaagtgacgcaagaagatgtggaaaacgtcgtccataccgcgaaaagcgtgcgtgtgcgcgatgagcatcgtgtgctgcatgtgatcccgcaagagtatgcgattgactatcaggaagggatcaagaatccggtaggacttagcggcgtgcggatgcaggcaaaagtgcacctgatcacatgtcacaacgatatggcgaaaaacatcgtcaaagcggttgaacgttgtgggctgaaagttgaccaactgatatttgccggactggcaagtagttatagcgtattgacggaagatgaacgtgaactgggtgtctgcgtcgtcgatatcggtggtggtacaatggatatcgccgtttataccggtggggcattgcgccacactaaggtaattccttatgctggcaatgtcgtgaccagtgatatcgcttacgcctttggcacgccgccaagcgacgccgaagcgattaaagttcgccacggttgtgcgctgggttccatcgttggaaaagatgagagcgtggaagtgccgagcgtaggtggtcgtccgccacggagtctgcaacgtcagacactggcagaggtgatcgagccgcgctataccgagctgctcaacctggtcaacgaagagatattgcagttgcaggaaaagcttcgccaacaaggggttaaacatcacctggcggcaggcattgtattaaccggtggcgcagcgcagatcgaaggtcttgcagcctgtgctcagcgcgtgtttcatacgcaagtgcgtatcggcgcgccgctgaacattaccggtttaacggattatgctcaggagccgtattatagcacggcggtgggattgcttcactatgggaaagagagtcatcttaacggtgaagctgaagtagaaaaacgtgttacagcaagtgttggcagctggatcaagcgactcaatagttggctgcgaaaagagttttaatttttatgaggccgacgatgattacggcctcaggcgacaggcacaaatcggagagaaactatgtttgaaccaatggaacttaccaatgacgcggtgattaaagtcatcggcgtcggcggcggcggcggtaatgctgttgaacacatggtgcgcgagcgcattgaaggtgttgaattcttcgcggtaaataccgatgcacaagcgctgcgtaaaacagcggttggacagacgattcaaatcggtagcggtatcaccaaaggactgggcgctggcgctaatccagaagttggccgcaatgcggctgatgaggatcgcgatgcattgcgtgcggcgctggaaggtgcagacatggtctttattgctgcgggtatgggtggtggtaccggtacaggtgcagcaccagtcgtcgctgaagtggcaaaagatttgggtatcctgaccgttgctgtcgtcactaagcctttcaactttgaaggcaagaagcgtatggcattcgcggagcaggggatcactgaactgtccaagcatgtggactctctgatcactatcccgaacgacaaactgctgaaagttctgggccgcggtatctccctgctggatgcgtttggcgcagcgaacgatgtactgaaaggcgctgtgcaaggtatcgctgaactgattactcgtccgggtttgatgaacgtggactttgcagacgtacgcaccgtaatgtctgagatgggctacgcaatgatgggttctggcgtggcgagcggtgaagaccgtgcggaagaagctgctgaaatggctatctcttctccgctgctggaagatatcgacctgtctggcgcgcgcggcgtgctggttaacatcacggcgggcttcgacctgcgtctggatgagttcgaaacggtaggtaacaccatccgtgcatttgcttccgacaacgcgactgtggttatcggtacttctcttgacccggatatgaatgacgagctgcgcgtaaccgttgttgcgacaggtatcggcatggacaaacgtcctgaaatcactctggtgaccaataagcaggttcagcagccagtgatggatcgctaccagcagcatgggatggctccgctgacccaggagcagaagccggttgctaaagtcgtgaatgacaatgcgccgcaaactgcgaaagagccggattatctggatatcccagcattcctgcgtaagcaagctgattaagaattgactggaatttgggtttcgaggctctttgtgctaaactggcccgccgaatgtatagtacacttcggttggataggtaatttggcgagataatacgatgatcaaacaaaggacacttaaacgtatcgttcaggcgacgggtgtcggtttacataccggcaagaaagtcaccctgacgttacgccctgcgccggccaacaccggggtcatctatcgtcgcaccgacttgaatccaccggtagatttcccggccgatgccaaatctgtgcgtgataccatgctctgtacgtgtctggtcaacgagcatgatgtacggattagtaccgtagagcacctcaatgctgctctcgcgggcttgggcatcgataacattgttatcgaagttaacgcgccggaaatcccgatcatggacggcagcgccgctccgtttgtatacctgctgcttgacgccggtatcgacgagttgaactgcgccaaaaaatttgttcgcatcaaagagactgttcgtgtcgaagatggcgataagtgggctgaatttaagccgtacaatggttttagcctggatttcaccatcgattttaaccatccggctattgattccagcaaccagcgctatgcgatgaacttctccgctgatgcgtttatgcgccagatcagccgtgcgcgtacgttcggtttcatgcgtgatatcgaatatctgcagtcccgtggtttgtgcctgggcggcagcttcgattgtgccatcgttgttgacgattatcgcgtactgaacgaagacggcctgcgttttgaagacgaatttgtgcgtcacaaaatgctcgatgcgatcggtgacttgttcatgtgtggtcacaatattattggtgcatttaccgcttataaatccggtcatgcactgaataacaaactgctgcaggctgtcctggcgaaacaggaagcctgggaatatgtgaccttccaggacgacgcagaactgccgttggccttcaaagcgcctagtgctgtactggcataacgacatttatactgtcgtataaaattcgactggcaaatctggcactctctccggccaggtgaaccagtcgtttttttttgaattttataagagctataaaaaacggtgcgaacgctgttttcttaagcacttttccgcacaacttatcttcattcgtgctgtggactgcaggctttaatgataagatttgtgcgctaaatacgtttgaatatgatcgggatggcaataacgtgagtggaatactgacgcgctggcgacagtttggtaaacgctacttctggccgcatctcttattagggatggttgcggcgagtttaggtttgcctgcgctcagcaacgccgccgaaccaaacgcgcccgcaaaagcgacaacccgcaaccacgagcctagtgccaaagttaactttggtcaattggccttgctggaagcgaacacacgccgcccgaatagcaactattccgttgattactggcatcaacatgccattcgcacggtaatccgtcatctttctttcgcaatggcaccgcaaacactgcccgttgctgaagaatctttgcctcttcaggcgcaacatcttgcattactggatacgctcagcgcgctgctgacccaggaaggcacgccgtctgaaaagggttatcgcattgattatgcgcattttaccccacaagcaaaattcagcacgcccgtctggataagccaggcgcaaggcatccgtgctggccctcaacgcctcacctaacaacaataaacctttacttcattttattaactccgcaacgcggggcgtttgagattttattatgctaatcaaattgttaactaaagttttcggtagtcgtaacgatcgcaccctgcgccggatgcgcaaagtggtcaacatcatcaatgccatggaaccggagatggaaaaactctccgacgaagaactgaaagggaaaaccgcagagtttcgtgcacgtctggaaaaaggcgaagtgctggaaaatctgatcccggaagctttcgccgtggtacgtgaggcaagtaagcgcgtctttggtatgcgtcacttcgacgttcagttactcggcggtatggttcttaacgaacgctgcatcgccgaaatgcgtaccggtgaaggaaaaaccctgaccgcaacgctgcctgcttacctgaacgcactaaccggtaaaggcgtgcacgtagttaccgtcaacgactacctggcgcaacgtgacgccgaaaacaaccgtccgctgtttgaattccttggcctgactgtcggtatcaacctgccgggcatgccagcaccggcaaagcgcgaagcttacgcagctgacatcacttacggtacgaacaacgaatacggctttgactacctgcgcgacaacatggcgttcagccctgaagaacgtgtacagcgtaaactgcactatgcgctggtggacgaagtggactccatcctgatcgatgaagcgcgtacaccgctgatcatttccggcccggcagaagacagcagcgaaatgtataaacgcgtgaataaaattattccgcacctgatccgtcaggaaaaagaagactccgaaaccttccagggcgaaggccacttcagcgtggacgaaaaatctcgccaggtgaacctgaccgaacgtggtctggtgctgattgaagaactgctggtgaaagagggcatcatggatgaaggggagtctctgtactctccggccaacatcatgctgatgcaccacgtaacggcggcgctgcgcgctcatgcgctgtttacccgtgacgtcgactacatcgttaaagatggtgaagttatcatcgttgacgaacacaccggtcgtaccatgcagggccgtcgctggtccgatggtctgcaccaggctgtggaagcgaaagaaggtgtgcagatccagaacgaaaaccaaacgctggctagcatcaccttccagaactacttccgtctgtatgaaaaactggcggggatgaccggtactgctgataccgaagctttcgaatttagcagtatctacaagctggataccgtcgttgttccgaccaaccgtccaatgattcgtaaagatctgccggacctggtctacatgactgaagcggaaaaaattcaggcgatcattgaagatatcaaagaacgtactgcgaaaggccagccggtgctggtgggtactatctccatcgaaaaaagcgagctggtgagtaacgaactgaccaaagccggtattaagcacaacgtcctgaacgccaaattccacgccaacgaagcggcgattgttgctcaggcaggttatccggctgcggtgactatcgcgaccaatatggcgggtcgtggtacagatattgtgctcggtggtagctggcaggcagaagttgccgcgctggaaaatccgaccgcagagcaaattgaaaaaattaaagccgactggcaggtacgtcacgatgcggtactggaagcaggtggcctgcatatcatcggtaccgagcgtcacgaatcccgtcgtatcgataaccagttgcgcggtcgttctggtcgtcagggggatgctggttcttcccgtttctacctgagcatggaagatgcgctgatgcgtatttttgcttccgaccgagtatccggcatgatgcgtaaactgggtatgaagccaggcgaagccattgaacacccgtgggtgactaaagcgattgccaacgcccagcgtaaagttgaaagccgtaacttcgacattcgtaagcaactgctggaatatgatgacgtggctaacgatcagcgtcgcgccatttactcccagcgtaacgaactgttggatgtcagcgatgtgagcgaaaccattaacagcattcgtgaagatgtgttcaaagcgaccattgatgcctacattccaccacagagcctggaagaaatgtgggatattccggggctgcaggaacgtctgaagaacgatttcgacctcgatttgccaattgccgagtggctggataaagaaccagaactgcatgaagagacgctgcgtgagcgcattctggcgcagtccatcgaagtgtatcagcgtaaagaagaagtggttggtgctgagatgatgcgtcacttcgagaaaggcgtcatgctgcaaacgcttgactccctgtggaaagagcacctggcagcgatggactatctgcgtcagggtatccacctgcgtggctacgcacagaaagatccgaagcaggaatacaaacgtgaaagcttctccatgtttgcagcgatgctggagagcttgaaatatgaagttatcagtacgctgagcaaagttcaggtacgtatgcctgaagaggttgaggagctggaacaacagcgtcgtatggaagccgagcgtttagcgcaaatgcagcagcttagccatcaggatgacgactctgcagccgcagctgcactggcggcgcaaaccggagagcgcaaagtaggacgtaacgatccttgcccgtgcggttctggtaaaaaatacaagcagtgccatggccgcctgcaataaaagctaactgttgaagtaaaaggcgcaggattctgcgccttttttataggtttaagacaatgaaaaagctgcaaattgcggtaggtattattcgcaacgagaacaatgaaatctttataacgcgtcgcgcagcagatgcgcacatggcgaataaactggagtttcccggcggtaaaattgaaatgggtgaaacgccggaacaggcggtggtgcgtgaacttcaggaagaagtcgggattaccccccaacattttagcctatttgaaaaactggaatatgaattcccggacaggcatataacactgtggttttggctggtcgaacgctgggaaggggagccgtggggtaaagaagggcaacccggtgagtggatgagcctggtcggtcttaatgccgatgattttccgccagccaatgaaccggtaattgcgaagcttaaacgtctgtaagtcagataaggcgttttcgccgcatccgacattcgcacacgatgcctgatgcgacgctggcgcgtcttatcaggcctaaagggatttctaactcattgataaatttgtttttgtaggtcggataaggcgttcacgccgcatccgacatttgcacaagatgcctgatgcgacgctgtccgcgtcttatcaggcctacgtgcggcatcagacaaatgtcactgctttggttcttcgctccagtcatcgctttcggaaagatcgccactgctggggattcgtttttcttcagcagcccattctccgaggtcgatcagctgacaacgtttggagcaaaatggccgaaacgggctgatttcaccccacaccaccgttttcccgcaggttgggcaattcaccgtaatagtttcactcatttttactccttagcaacaggccagttcgaaatccagacgttccggtacctgtccgttttcagtgtccagcggcataaaacgaatggcaaaacggctcttatgtccggaaatttgcggataaagctgactatcgaggctcagattcaggcgcagcaagtcggcatcgccaccgttatcctgataaaaaccattcaggctggtttgtttacggaagggggcgctctggcgaattaaatccagcaccatggtaagtgcctgggtgagcgggttcaggctggcaatccaggtttctacctggctgtcgcgctgcgcctggggtagatgcagccaaatgtgcaatgtaggtaaatcaaagctgcaacagccgcctgggatgctcagtcgctgacgcaccagagcaatcaaacgatcttcacgcagaaattgcccgatacgcggcgcggaaattaatacgctccccgccgcttttaactgctgaattaatgcttcaatacggctctggtccacgccaggcacgccaatccaggtctggagtttacgttgctgccggtcaagttctttcaacagctcagtgcggacttcgccgcgctcgaaaacatccagtaattcactgacattacggaagaaatgcagcgcgccagcgtggtcaacgatgggtaaattaacggtgagttgctgaatcaaaaactcaatgcgcagccatgtacgcattttttcatttagtggatgttcaaaaaggacctgggtctgcattacggtttttcctgactgacaaactggctcgcaagctgcaaatagtgtgcgtgcaggcgggcaacatcgcttgcgatagcatccggtgcgccgttattatcaatgacgtcatctgccacggcaaggcgggcttcgcgcgttgcctgagcagcaaggatttgttcgacatgctcgcgagttacatcatcgcgctgcatggtgcgcttaagttgcgtttctgggctgacatccaccacaagcactcgattcgcttttttatacagactgttttctaccagcaatggcacaacccacagtacatagggggaagtagcttgctggatctggtgttgcgtctcttgctgaatcagcggatgcagcagggcgttaagccagtttttctcttccgggttggcgaagatccgctcgcgcaaggcccggcgctgcaatgttccatcagcagcaatcatgttagcgccaaagtgatcagcaatggcatgtagcgcaggtgcacctggttcaaccacctgacgcgcaataatatcggcatcaatgacgttaattccgagatcagcaaacgcattggcaacggtactcttgccactgccaatgcctcccgttaaggcaactatatacctcataatttatattcccgggaattcatcatgattatcaaaacgttaaaaatgagtgcacgaaagcgaaattgatgaaacgttcgctcactatttaccaggtaaatttatgggattgtagcgtaaaaaaagacaatttcgcagtcttgcgccgcattgattagtgcgtatgatagcgtcactggagttgcgctcttacccttatagccattaaccccaggaatccgcacatgcgtattgaagaagatctgaagttaggttttaaagacgttctcatccgccctaaacgctccactcttaaaagccgttccgatgttgaactggaacgtcaattcaccttcaaacatagtggtcagagctggtccggcgtgccgattatcgccgcaaatatggacaccgtaggcacattttctatggcctctgcgctggcttcttttgatattttgactgctgtgcataaacactattctgtcgaagagtggcaagcgtttatcaacaattcttccgctgatgtgctgaaacatgtgatggtttctaccggtacgtctgatgcggatttcgaaaaaactaaacagattctcgacctgaacccggcattaaacttcgtttgtattgacgtggcgaatggttattccgaacacttcgtgcagttcgttgcgaaagcgcgtgaagcgtggccgaccaaaaccatttgtgctggtaacgtagtgactggtgaaatgtgtgaggagcttatcctcagtggtgccgatatcgttaaagttggcattggcccaggttctgtttgtacaactcgcgtcaaaacaggcgtcggttatccgcaactttctgcggtaatcgaatgtgccgatgctgcgcacggtctgggcggaatgatcgtcagcgatggtggctgcaccacgccgggcgatgtggcgaaagcctttggcggcggtgccgatttcgtcatgcttggcggcatgctggcgggccacgaagagagcggcggtcgcatcgttgaggagaacggcgagaaatttatgctgttctacggcatgagctccgagtctgcgatgaaacgtcacgttggcggcgttgcggaatatcgcgcagcagaaggtaaaaccgttaagctgccgctgcgaggcccggttgaaaataccgcgcgagatattttgggcggcctgcgtagtgcttgtacatacgttggggctagtcgcctgaaagagctgaccaagcgcaccacgtttattcgtgtgcaggaacaagaaaaccgcatcttcaacaacctgtaatctcccaacgctggcgtggagcaacacgccagcgttatcccatcccactcatcgcatcgcctaaatggaaaattggcagatacattgccaccaccagcgtaccaataattcctcccgttatgatcagcaacgccggttccagtaaggctgcgaggttatccgccagcgccattgtgttttcccgatgatgatgggcgaggttgtctaacatgagatccagagagccggatgcctctcctgttctcactaattgcaaacagagcgggctaaactcaccggtattttttagcgccagccagatgggttgaccgttactgatatcgtgctggatttgtgtcagaagttgcacccagtacgggcagcgcattgtttctctgacgctctctacgccctgtaaaaaagtaatgcctgcactttgtgtcagcgccagaatcgtaaagatctgcgtgagtttttgtccccgcatcagactacccataatcgggatgcgtaacagcaatttctgccgcactataagccaggtcggtcggcgcatcagcaacttattggctatcgccagcagaaagccgaacaacaccagcagccagctccattcgccactaaagtctgccagcgtcatgatcccctgcgttagtgccggtagtggggtgttgaaggtcttatagatagcggcaaactccggcagaacaaaatgcagcattgccacaaccaccatgattgccatcgctaaaatgatgatgggataacgtaacgcacttttcactttgtcggtcaactgacgctgggctttttgctgacgcgccagttcaaagcagcattcatccagcttaccggtcagttcacccgtgcggatcatcgcctgatagagcggcggaaatacctcactccagggtaataaggcattggaaaaagcaatgccctgttcgagatcgtgcgccaggctttgcagcaacgcttgccattgcttactgggatgctgttccgccagcagagccagcccttcagaaagcgttaaccctgctttgagtagcgtcgccagttgatgaatgacttccgcgcttttatctcctcgccactgcgcagaattgatggcgattcgcttcaggcttagtggggtaaccatctgttgctgtagtgccataagcagtaaagtacggctctctgcccatagcatcccatcttgcgcattgccgtcgccggttatgccatgccagcgccagagttgcttactcgccatgcggcatccccagtacgcggattaactcttcaaaggtggttaagccttgctctacggccaggcagccgttttcaaaaagcgtacgcatacccgcctgtcgtgcgtgcgtttccaggctttcaacgtcggtattagcggaaataagctgacgaatgaccggcgttatgggcagaacttcaaataaggccgtacgaccataaaaaccgtggtagcaatgtacacaaccgggtgcctgccagtggggcagcgggcttggccatacattgtctggaatgtggatgggctccccttgctgccggcgacaatgtgggcaaagtttgcgtaccagacgctgggctattaccagcgtaagcgcgctacttagcatccagcgggcgacccccatttgctgtaaacgtaccagcgtttcgcaggtggaattagtgtgtagggtagacaacaccaggtgaccagtttgcgccgctttaatagcgatctctgctgtttcgccatcgcggatctctccgatcatgatgacgtcaggatcctggcgcaataacgcacgcaaaacgccctgaaaggtgagtccggcacgcggatggatttgcgtctggtttagtccggctatggggatctcaactggatcttcgacgctacaaatattaatgtcagcggtattcagcttttgcagggcactataaagcgtgaccgttttgccgctgccggtagggccagttaccagcaccagtccctgtggttgttgcaaggcatgagcaaagtccgccagttgtaacggctgcattccaagcgtgttgacatccagtgcctgacccacctgctgtaacaaccttaataccaccttttcaccaccccgacatggtaaggtcgcaatacgaaaactgacggcgtttcctgccagttcgacagtgaattgcccgtcctgcggcaggcgatgttccgcaatatccaggtttcccagcacttttaatctggcggttaatgcgactccggcatccggactaacatccggtaaaggatgcaatacgccgtcgatacgcaagcggatgcggtaggcattgtccgctggttcgatatgaatatcagacgcgcgttgttccagcgcagattgtaacgttcgagttagcaactctgctttgggctgatgcttctcctgaacagctacgggcagtgtctgttgtgtgcgactggcgtgaccttccatttgttggcgcgtccagcaggtgatctcaatacgtttggtggtagcgaaatgcaatgcgtccagtagctcatggctaggtgcatcgactaccgcaacatgaaccacctcttcgctggcatccagcaagactccatgataacgcagacacagggcagtgagctgtggaatattcattgccgctccttagttggcgtcatcaaagcggaagacatcttcgcaggcttgctgcaatgcgctgtcactttgaatattgcagttgcgcgtccagccggtgacgccgtttgcgttatcccaacccggtgtcatgacgacgcttagcccattgagactttcttgcccggtcaggctcaccacgccctttgccacactcatggcactaacatagcgggtggtggtagggctgggaatgccattgctgccaccgtcgcaggtatctaatccaccatgttccagcgcgcacaactctacggcggtacggtaaggcacaaaggtttgtagcatgtcggtgagtgcggctttgcgcaggtagttttgataagcgggaataccaatggcgcttaaaatggcaatgatgccaataaccaccatcagttcgataagtgtaaaaccgcgttgcttgtccatctgtttcgctccttgatttggttggcgctactttggcaaacgccatcagcacaggcgaggggcaaaaaacgaaacgggaaagcagattccgaggttttttatttcgttgcagcgaaagacaagaaatttgcgaggcgttacgaagaaagttggggaaggggagattatccgcccgcgatggagcggataaatctgtcaactattagcgaaaacgcatactaaggtcgagtgcttgtacgtgtttagttagcgcaccgacggagataaagtccacgcccgtttcggcaaattcacgcagtgttttgtcagtgacgttgccagacacttccagtagcgccttgccgttggtgcgtttgacggcttcgcgcatctgttctgtttcgaagttatccagcatgatgatatcggctcctgctttcagggcttcatcaagttcttccagattctctacttcgacttctactggcgcatccgggtgcagccaggacgctttttcgaccgcctggcgcacactgccggaggcaataatatggttttctttgatcaggaaggcatcagaaagccccagacggtgattcgctccgccgccgcaaagtaccgcgtatttcagagcactacgcaggccgggtaaggttttgcgcgtatccaacaactgcgtgttggtgccttccagcaattcgacatagtggcgtaccttactggcaactccactaagggtttgcacaaaattaagcgcagtgcgttcgcccgttaacagcacgcgggatgggccttcaagttcgaacaaggattgattggcattgatgacatcgccgtcatccacatgccagattatggtgacatcgtcgcctgccagttgaataaacacctcttcaacccagcgtttgccgcaaaagacgccattctcgcgggtgatcaccgtggcatgagagcgagaattttccggtaaaagttttgccgtaatatcattgttggcatcgactgttccgcctaaatcttcccgcagcgcctgggccaccgcgccggggatatcgagattaatgcgttccagcagctcgtcacgtcgggtgtcagggttatagcggcgaggcggcatgttaaaactccagatagctaacgaatcataaggtagaaacatgctactctgaaccgggtattagcaccacatataaggagatcctgcatgttgttagaacaggggtggctggttggcgcgcgccgcgttcccagtccacattacgattgccgcccggatgacgaaacacccaccctgctggtggtgcacaatattagcctgccgccaggcgagtttggcggtccgtggatcgacgcattattcactggaactattgatccgcaggcacatcctttctttgctgagatcgcccatttgcgcgtctccgctcactgtttgattcgccgtgatggtgaaatagtccagtatgttcctttcgataaacgtgcatggcatgcgggagcctctcagtatcaggggcgcgaacgctgcaatgatttttctattgggattgagcttgaaggcaccgatacgctggcgtataccgatgcgcagtatcaacagcttgcggcggttacgcgggcactgattgattgctatccggatatcgctaaaaacatgacgggccattgtgatattgcgccggatcggaaaaccgatcccggtcctgcatttgattgggcacggtttcgtgtgctggtcagcaaggagacaacatgacgctatttacaaccttactggtgttaattttcgagcgcctgtttaagttgggcgagcactggcagcttgatcatcgtcttgaagcgttctttcggcgggtgaaacatttttctctcgggcgcacgttaggcatgaccattattgcgatgggcgtgacttttttactgttacgcgcattgcagggagtattgttcaacgttcccacgctactggtgtggctgctgattggtttgctgtgtattggcgcaggtaaagttcgtcttcattatcatgcttatctgacagctgctagtcgtaatgatagccatgcccgtgccacgatggctggcgaactcaccatgattcacggcgtcccggcaggctgcgacgaacgtgagtatttgcgtgagctgcaaaatgcattgctgtggattaactttcgtttttatcttgcaccgctgttctggctgattgtggggggaacctggggacccgttacgctgatggggtatgcgtttttgcgtgcatggcaatactggctggcgcgatatcagacgccgcatcatcgtttacagtccggcattgatgccgtgcttcatgtactggattgggtgccggttcgtcttgcgggtgtggtatatgccttgatcggtcatggtgagaaagcgttaccggcctggtttgctagcctgggtgatttccatactagccagtatcaggtgttaacgcgtctggcgcagttctctctggcgcgtgaaccgcatgtcgataaggtggagacgccgaaggcagcggttagtatggcgaagaaaaccagcttcgtggtcgtggtggtgattgcactactgacgatttacggggcgttggtgtaaagattattgccctcaccctgtacgggtgagggcgtagagagattaatgcgcttttacggctttggcggttttctctttaaacagatagccgatacctaacacgatcagccataccgggatcaggtatacgctaatcgccattcctggggtcatcagcataatcaccagtaccgccgccataaacagcaggcagatccagttacccagcggataaagcagagcagggaagcgagttaccacgccttgttcctgcttggcgcgacggaatttcatatgcgccaggctaatcatcgcccagttgattaccagtgcagataccaccagcgccattaacagtccgaaagcggactctggggcaaggtagttaatcagtacgcacaacgccgttaccagtgcagacaccagaatggtatttactggtacaccacgtttatcgacagacgccagcgcttttggcgcattaccctgttgtgccagaccaaacagcatacggctgttgcaatatacgcagctgttgtacacggagagcgccgcagtcagtaccacgatgttcagcgcattcgccacaaaggtatcgcctaactcgtggaagatcagcacaaacggactggtatcggcggtaacgcgggtccacggcatcagactgagcagaacggctaagctaccaatatagaaaatcaggatgcggtagataacctggttagttgctttcggtatactttgctccgggttatcagcttctgctgcggtgatccccaccagttccagaccaccgaagctgaacatgataatcgccatcatcatcaccagcccggtgaagccgtgcggcaggaaaccaccctgatcccacaggttgctaacggtcgcctgcgggccgccgttgccactgaatagcagccagccgccgaagatgatcatcgctaccaccgcgataactttgataatggcaaaccagaactccatctcgccaaacactttaacgttggtcaggttgatggcgttaatcaccacaaagaatacggcggcagaaacccaggtggggatttccggataccagaactgaatgtatttacccacggcagtcagctcagccatggcaactaaaacgtacagtacccagtagttccagccagaggcgaaaccggcaaaactgccccagtatttataagcaaagtggctaaaggagcctgcgacaggttcttcgaccaccatttcacccagctgacgcatgatcagaaaggcgataaaaccagcaatggcgtaacccaggataatccctggccctgcggactgtattacggaggcgctacccaggaataacccggtccctatcgcgccacccagcgcgataagctgaatatggcggtttttaaggccgcgctttagctgctcgccgtgctgttgaccttccatcatgaaacctcgtgcggtggttgtttttttgatctacgcagtgatgcgtgtgtaagtttgcaattccgtttgttgtattaatttgtttacatcaaagaagtttgaattgttacaaaaagacttccgtcagatcaagaataatggtatgcggcagcgaatgcacccgctttatgcatggttgaagatgagttgcttaaaaagaaaccgtttgtaaagctcagcctcaacccctctcaatatgtagaatgaatttaaattcgttttaattgaattaaaaatcacaaaattggtaagtgaatcggttcaattcggatttttatagtttaataatcgttaaaaaactcctttcctacgtaaagtctacatttgtgcatagttacaactttgaaacgttatatatgtcaagttgttaaaatgtgcacagtttcatgatttcaatcaaaacctgtatggacataaggtgaatactttgttactttagcgtcacagacatgaaattggtaagaccaattgacttcggcaagtggcttaagacaggaactcatggcctacagcaaaatccgccaaccaaaactctccgatgtgattgagcagcaactggagtttttgatcctcgaaggcactctccgcccgggcgaaaaactcccaccggaacgcgaactggcaaaacagtttgacgtctcccgtccctccttgcgtgaggcgattcaacgtctcgaagcgaagggcttgttgcttcgtcgccagggtggcggcacttttgtccagagcagcctatggcaaagcttcagcgatccgctggtggagctgctctccgaccatcctgagagtcagtatgacttgctcgaaacacgacacgccctggaaggtatcgccgcttattacgccgcgctgcgtagtaccgatgaagacaaggaacgcatccgtgaactccaccacgccatagagctggcgcagcagtctggcgatctggacgcggaaagtaacgccgtactccagtatcagattgccgtcaccgaagcggcccacaatgtggttctgcttcatctgctaaggtgtatggagccgatgttggcccagaatgtccgccagaacttcgaattgctctatagccgtcgcgagatgctgccgctggtgagtagtcaccgcacccgcatatttgaagcgattatggccggtaagccggaagaagcgcgcgaagcaagccatcgccatctggcctttatcgaagaaattttgctcgacagaagtcgtgaagagagccgccgtgagcgttctctgcgtcgtctggagcaacgaaagaattaatgatttttctggtaaaaattatccagaagatgttgtaaatcaagcgcatataaaagcgcggcaactaaacgtagaacctgtcttattgagctttccggcgagagttcaatgggacaggttccagaaaactcaacgttattagatagataaggaataacccatgagtgaacgtttcccaaatgacgtggatccgatcgaaactcgcgactggctccaggcgatcgaaagcgtcatccgtgaagaaggtgttgagcgtgctcagtatctgatcgaccaactgcttgctgaagcccgcaaaggcggtgtaaacgtagccgcaggcacaggtatcagcaactacatcaacaccatccccgttgaagaacaaccggagtatccgggtaatctggaactggaacgccgtattcgtagtgctatccgctggaacgccatcatgacggtgctgcgtgcgagcaaaaaagacctcgaactgggcggccatatggcgtccttccagtcttccgcaaccatttatgatgtgtgctttaaccacttcttccgtgcacgcaacgagcaggatggcggcgacctggtttacttccagggccacatctccccgggcgtgtacgctcgtgctttcctggaaggtcgtctgactcaggagcagctggataacttccgtcaggaagttcacggcaatggcctctcttcctatccgcacccgaaactgatgccggaattctggcagttcccgaccgtatctatgggtctgggtccgattggtgctatttaccaggctaaattcctgaaatatctggaacaccgtggcctgaaagatacctctaaacaaaccgtttacgcgttcctcggtgacggtgaaatggacgaaccggaatccaaaggtgcgatcaccatcgctacccgtgaaaaactggataacctggtcttcgttatcaactgtaacctgcagcgtcttgacggcccggtcaccggtaacggcaagatcatcaacgaactggaaggcatcttcgaaggtgctggctggaacgtgatcaaagtgatgtggggtagccgttgggatgaactgctgcgtaaggataccagcggtaaactgatccagctgatgaacgaaaccgttgacggcgactaccagaccttcaaaagcaaagatggtgcgtacgttcgtgaacacttcttcggtaaatatcctgaaaccgcagcactggttgcagactggactgacgagcagatctgggcactgaaccgtggtggtcacgatccgaagaaaatctacgctgcattcaagaaagcgcaggaaaccaaaggcaaagcgacagtaatccttgctcataccattaaaggttacggcatgggcgacgcggctgaaggtaaaaacatcgcgcaccaggttaagaaaatgaacatggacggtgtgcgtcatatccgcgaccgtttcaatgtgccggtgtctgatgcagatatcgaaaaactgccgtacatcaccttcccggaaggttctgaagagcatacctatctgcacgctcagcgtcagaaactgcacggttatctgccaagccgtcagccgaacttcaccgagaagcttgagctgccgagcctgcaagacttcggcgcgctgttggaagagcagagcaaagagatctctaccactatcgctttcgttcgtgctctgaacgtgatgctgaagaacaagagcatcaaagatcgtctggtaccgatcatcgccgacgaagcgcgtactttcggtatggaaggtctgttccgtcagattggtatttacagcccgaacggtcagcagtacaccccgcaggaccgcgagcaggttgcttactataaagaagacgagaaaggtcagattctgcaggaagggatcaacgagctgggcgcaggttgttcctggctggcagcggcgacctcttacagcaccaacaatctgccgatgatcccgttctacatctattacagcatgttcggcttccagcgtattggcgatctgtgctgggcggctggcgaccagcaagcgcgtggcttcctgatcggcggtacttccggtcgtaccaccctgaacggcgaaggtctgcagcacgaagatggtcacagccacattcagagcctgactatcccgaactgtatctcttacgacccggcttacgcttacgaagttgctgtcatcatgcatgacggtctggagcgtatgtacggtgaaaaacaagagaacgtttactactacatcactacgctgaacgaaaactaccacatgccggcaatgccggaaggtgctgaggaaggtatccgtaaaggtatctacaaactcgaaactattgaaggtagcaaaggtaaagttcagctgctcggctccggttctatcctgcgtcacgtccgtgaagcagctgagatcctggcgaaagattacggcgtaggttctgacgtttatagcgtgacctccttcaccgagctggcgcgtgatggtcaggattgtgaacgctggaacatgctgcacccgctggaaactccgcgcgttccgtatatcgctcaggtgatgaacgacgctccggcagtggcatctaccgactatatgaaactgttcgctgagcaggtccgtacttacgtaccggctgacgactaccgcgtactgggtactgatggcttcggtcgttccgacagccgtgagaacctgcgtcaccacttcgaagttgatgcttcttatgtcgtggttgcggcgctgggcgaactggctaaacgtggcgaaatcgataagaaagtggttgctgacgcaatcgccaaattcaacatcgatgcagataaagttaacccgcgtctggcgtaagaggtaaaagaataatggctatcgaaatcaaagtaccggacatcggggctgatgaagttgaaatcaccgagatcctggtcaaagtgggcgacaaagttgaagccgaacagagcctgatcaccgtagaaggcgacaaagcctctatggaagttccgtctccgcaggcgggtatcgttaaagagatcaaagtctctgttggcgataaaacccagaccggcgcactgattatgattttcgattccgccgacggtgcagcagacgctgcacctgctcaggcagaagagaagaaagaagcagctccggcagcagcaccagcggctgcggcggcaaaagacgttaacgttccggatatcggcagcgacgaagttgaagtgaccgaaatcctggtgaaagttggcgataaagttgaagctgaacagagcctgatcaccgtagaaggcgacaaggcttctatggaagttccggctccgtttgctggcaccgtgaaagagatcaaagtgaacgtgggtgacaaagtgtctaccggcagcctgattatggtcttcgaagtcgcgggtgaagcaggcgcggcagctccggccgctaaacaggaagcagctccggcagcggcccctgcaccagcggctggcgtgaaagaagttaacgttccggatatcggcggtgacgaagttgaagtgactgaagtgatggtgaaagtgggcgacaaagttgccgctgaacagagtctgatcaccgtagaaggcgacaaagcttctatggaagttccggcgccgtttgcaggcgtcgtgaaggaactgaaagtcaacgttggcgataaagtgaaaactggcagcctgattatgatcttcgaagttgaaggcgcagcgcctgcggcagctcctgcgaaacaggaagcggcagcgccggcaccggcagcaaaagctgaagccccggcagcagcaccagctgcgaaagcggaaggcaaatctgaatttgctgaaaacgacgcttatgttcacgcgactccgctgatccgccgtctggcacgcgagtttggtgttaaccttgcgaaagtgaagggcactggccgtaaaggtcgtatcctgcgcgaagacgttcaggcttacgtgaaagaagctatcaaacgtgcagaagcagctccggcagcgactggcggtggtatccctggcatgctgccgtggccgaaggtggacttcagcaagtttggtgaaatcgaagaagtggaactgggccgcatccagaaaatctctggtgcgaacctgagccgtaactgggtaatgatcccgcatgttactcacttcgacaaaaccgatatcaccgagttggaagcgttccgtaaacagcagaacgaagaagcggcgaaacgtaagctggatgtgaagatcaccccggttgtcttcatcatgaaagccgttgctgcagctcttgagcagatgcctcgcttcaatagtagcctgagcgaagacggtcagcgtctgaccctgaagaaatacatcaacatcggtgtggcggtggataccccgaacggtctggttgttccggtattcaaagacgtcaacaagaaaggcatcatcgagctgtctcgcgagctgatgactatttctaagaaagcgcgtgacggtaagctgactgcgggcgaaatgcagggcggttgcttcaccatctccagcatcggcggcctgggtactacccacttcgcgccgattgtgaacgcgccggaagtggctatcctcggcgtttccaagtccgcgatggagccggtgtggaatggtaaagagttcgtgccgcgtctgatgctgccgatttctctctccttcgaccaccgcgtgatcgacggtgctgatggtgcccgtttcattaccatcattaacaacacgctgtctgacattcgccgtctggtgatgtaagtaaaagagccggcccaacggccggcttttttctggtaatctcatgaatgtattgaggttattagcgaatagacaaatcggttgccgtttgttgtttaaaaattgttaacaattttgtaaaataccgacggatagaacgacccggtggtggttagggtattacttcacataccctatggatttctgggtgcagcaaggtagcaagcgccagaatccccaggagcttacataagtaagtgactggggtgagggcgtgaagctaacgccgctgcggcctgaaagacgacgggtatgaccgccggagataaatatatagaggtcatgatgagtactgaaatcaaaactcaggtcgtggtacttggggcaggccccgcaggttactccgctgccttccgttgcgctgatttaggtctggaaaccgtaatcgtagaacgttacaacacccttggcggtgtttgcctgaacgtcggctgtatcccttctaaagcactgctgcacgtagcaaaagttatcgaagaagccaaagcgctggctgaacacggtatcgtcttcggcgaaccgaaaaccgatatcgacaagattcgtacctggaaagagaaagtgatcaatcagctgaccggtggtctggctggtatggcgaaaggccgcaaagtcaaagtggtcaacggtctgggtaaattcaccggggctaacaccctggaagttgaaggtgagaacggcaaaaccgtgatcaacttcgacaacgcgatcattgcagcgggttctcgcccgatccaactgccgtttattccgcatgaagatccgcgtatctgggactccactgacgcgctggaactgaaagaagtaccagaacgcctgctggtaatgggtggcggtatcatcggtctggaaatgggcaccgtttaccacgcgctgggtagtcagattgacgtggttgaaatgttcgaccaggttatcccggcagctgacaaagacatcgttaaagtcttcaccaagcgtatcagcaagaaattcaacctgatgctggaaaccaaagttaccgccgttgaagcgaaagaagacggcatttatgtgacgatggaaggcaaaaaagcacccgctgaaccgcagcgttacgacgccgtgctggtagcgattggtcgtgtgccgaacggtaaaaacctcgacgcaggcaaagcaggcgtggaagttgacgaccgtggtttcatccgcgttgacaaacagctgcgtaccaacgtaccgcacatctttgctatcggcgatatcgtcggtcaaccgatgctggcacacaaaggtgttcacgaaggtcacgttgccgctgaagttatcgccggtaagaaacactacttcgatccgaaagttatcccgtccatcgcctataccgaaccagaagttgcatgggtgggtctgactgagaaagaagcgaaagagaaaggcatcagctatgaaaccgccaccttcccgtgggctgcttctggtcgtgctatcgcttccgactgcgcagacggtatgaccaagctgattttcgacaaagaatctcaccgtgtgatcggtggtgcgattgtcggtactaacggcggcgagctgctgggtgaaatcggcctggcaatcgaaatgggttgtgatgctgaagacatcgcactgaccatccacgcgcacccgactctgcacgagtctgtgggcctggcggcagaagtgttcgaaggtagcattaccgacctgccgaacccgaaagcgaagaagaagtaatttttcgtttgccggaacatccggcaattaaaaaagcggctaaccacgccgctttttttacgtctgcaatttacctttccagtcttcttgctccacgttcagagagacgttcgcatactgcactccgttgctcgttattcagcctgacagtatggttactgtcgtttagacgttgtgggcggctctcctgaactttctcccgaaaaacctgacgttgttcaggacttgcgctttgaacacgctggcgggcgttatcacgttgctgttgattcagtgggcgctgctgtactttttccttaaacacctggcgctgctctggacttgcggactgaatacgctcacgcgctgcgtctcttcgctgctggttctgcgggttagtctgcattttctcgcgaaccgcctggcgctgctcagggctggcggactgaatgcgctcacgcgctgcctctcttcgctgctggatcttcgggttagtctgcattctctcgcgaactgcctggcgctgctcagggctggcggactgataacgctgacgagcggcgtccttttgttgctgggtcagtggttggcgacggctgaagtcgtggaagtcgtcatagctcccatagtgttcagcttcattaaaccgctgtgccgctgcctgacgttgggtatctcgtgtaatgactggtgcggcgtgtgttcgttgctgaaactgatttgctgccgcctgacgctggctgtcgcgcgttggggcaggtaattgcgtggcgctcattccgccgttgacatcggtttgatgaaaccgctttgccatatcctgatcatgatagggcacaccattacggtagtttggattgtgccgccatgccatattcttatcagtaagatgctcaccggtgatacggttgaaattgttgacgtcgatattgatgttgtcgccgttgtgttgccagccattaccgtcacgatgaccgccatcgtggtgatgataatcatcattgtcatgatgatgatggtcatgatcgtcgtcgtcccagtcgatgctgctgaatagtgcgtacgtggtagcaacgcccatgctatagccgaatccgcgtacaaagctgtcaacaaacggttctccggctggtggtggcagataaaccggcggatacgcagtattggcccagttcccgtaaaccacggttgggttgtagttgggaatatagaccacatcaggattggcgggctcaatggaaatgacggttgttgccggctctgtaatgacggggttggcagttaaaactgtattggatggtatgacgggtgccgtgactgtctgttttaccggtacagctttcttcgttgtggtaataactttctgttcggtactactcttcaggctgccggtttgttgcgccagttgccgcaatcgctgtacgctgtccatcacgtcctgcggctgggccagaaaagcatcgcccaggttttgcacccattgcgggttttcgcccatcaatgccatcaattgtggaaaggccaccagacttttaacgctggcgtcccacggctggtcagataccgcctgaatagcagcatcgccttgtttaagtggattatcgtggctccattgcactgcttgagcaacgtttgtcggataggtacttgccatcagcacctggctaagtagggcgtcgggatacagcgcgacgggcgcgacccattgatctatttgtgcagtgctgaatgcggatttgacgacggcgggtgttacgggaggtgcggaaaccgttgcaggaaacgtaaccgcggcagcgtcagacacagccagttgtgtgctttgcggttccacaggcgcttccactgtgcggctttttatatatagcccggtagaggcggcacaaagcccggcactgcaaattagcgccagcacatggggtttaaacggcaaagtcattttcataattcggatctcaaggaaatcgcaatggtcggcgaactgccacccgcaggtgctgtgaatccgagtataaagaggcggtagtttaaattttgactaatcttgggattcgttgagaaaggtgattatcaccatgcgaattaacgaagtttttacggagggaaacaatctctagaccatccttaacgattcagccacttttttatgttgcttttttgtaaacagattaacacctcgtcaaaatcctgctattctgcccgttgcggtactgggcatttaccctacaaactgctgtctcacaggagcgtgaagagaatcgcctgccgcactatgacaatgagagcgaggagaaccgtcgtgctagaagaataccgtaagcacgtagctgagcgtgccgctgaggggattgcgcccaaacccctggatgcaaaccaaatggccgcacttgtagagctgctgaaaaacccgcccgcgggcgaagaagaattcctgttagatctgttaaccaaccgtgttcccccaggcgtcgatgaagccgcctatgtcaaagcaggcttcctggctgctatcgcgaaaggcgaagccaaatcccctctgctgactccggaaaaagccatcgaactgctgggcaccatgcagggtggttacaacattcatccgctgatcgacgcgctggatgatgccaaactggcacctattgctgccaaagcactttctcacacgctgctgatgttcgataacttctatgacgtagaagagaaagcgaaagcaggcaacgaatatgcgaagcaggttatgcagtcctgggcggatgccgaatggttcctgaatcgcccggcgctggctgaaaaactgaccgttactgtcttcaaagtcactggcgaaactaacaccgatgacctttctccggcaccggatgcgtggagtcgcccggatatcccactgcacgcgctggcgatgctgaaaaacgcccgtgaaggtattgagccagaccagcctggtgttgttggtccgatcaagcaaatcgaagctctgcaacagaaaggtttcccgctggcgtacgtcggtgacgttgtgggtacgggttctagccgtaaatccgccactaactccgttctgtggtttatgggcgatgatattccacatgtgccgaacaaacgcggcggtggtttgtgcctcggcggtaaaattgcacccatcttctttaacacgatggaagacgcgggtgcactgccaatcgaagtcgacgtctctaacctgaacatgggcgacgtgattgacgtttacccgtacaaaggtgaagtgcgtaaccacgaaaccggcgaactgctggcgaccttcgaactgaaaaccgacgtgctgattgatgaagtgcgtgctggtggccgtattccgctgattatcgggcgtggcctgaccaccaaagcgcgtgaagcacttggtctgccgcacagtgatgtgttccgtcaggcgaaagatgtcgctgagagcgatcgcggcttcagcctggcgcaaaaaatggtaggccgtgcctgtggcgtgaaaggcattcgtccgggcgcgtactgtgaaccgaaaatgacttctgtaggttcccaggacaccaccggcccgatgacccgtgatgaactgaaagacctggcgtgcctgggcttcagcgctgacctggtgatgcagtctttctgccacaccgcggcgtatccgaagccagttgacgtgaacacgcaccacacgctgccggacttcattatgaaccgtggcggtgtgagcctgcgtccgggtgacggcgtcattcactcctggctgaaccgtatgctgctgccggataccgtcggtaccggtggtgactcccatacccgtttcccgatcggtatctctttcccggcgggttctggtctggtggcgtttgctgccgcaactggcgtaatgccgcttgatatgccggaatccgttctggtgcgcttcaaaggcaaaatgcagccgggcatcaccctgcgcgatctggtacacgctattccgctgtatgcgatcaaacaaggtctgctgaccgttgagaagaaaggcaagaaaaacatcttctctggccgcatcctggaaattgaaggtctgccggatctgaaagttgagcaggcctttgagctaaccgatgcgtccgccgagcgttctgccgctggttgtaccatcaagctgaacaaagaaccgatcatcgaatacctgaactctaacatcgtcctgctgaagtggatgatcgcggaaggttacggcgatcgtcgtaccctggaacgtcgtattcagggcatggaaaaatggctggcgaatcctgagctgctggaagccgatgcagatgcggaatacgcggcagtgatcgacatcgatctggcggatattaaagagccaatcctgtgtgctccgaacgacccggatgacgcgcgtccgctgtctgcggtacagggtgagaagatcgacgaagtgtttatcggttcctgcatgaccaacatcggtcacttccgtgctgcgggtaaactgctggatgcgcataaaggtcagttgccgacccgcctgtgggtggcaccgccaacccgtatggacgccgcacagttgaccgaagaaggctactacagcgtcttcggtaagagtggtgcgcgtatcgagatccctggctgttccctgtgtatgggtaaccaggcgcgtgtggcggacggtgcaacggtggtttccacctctacccgtaacttcccgaaccgtctgggtactggcgcgaatgtcttcctggcttctgcggaactggcggctgttgcggcgctgattggcaaactgccgacgccggaagagtaccagacctacgtggcgcaggtagataaaacagccgttgatacttaccgttatctgaacttcaaccagctttctcagtacaccgagaaagccgatggggtgattttccagactgcggtttaaaaagtcagcgcacgcgctgcgcataaacgacacaatgcccggtgaatgagattcccgggcatttttttatttctaaaccatcgccgttccgctgtttttctccggtaaggctgcgataattacatcaatggcgcaatgcgatttcggtgcattgccgggagcagaggaacacactatggattacgaatttctgcgcgatattaccggagtggtaaaggtgcgtatgtccatggggcatgaagtggtcgggcactggtttaatgaagaggtgaaagaaaacctggccttgcttgatgaagtggaacaagcagcgcacgcactgaaaggtagcgaacggtcctggcaacgggcagggcatgaatacaccctgtggatggacggtgaagaggtgatggttcgcgccaatcaactggaattcgctggcgatgaaatggaagaggggatgaactactacgacgaagaaagcctgagcctatgcggcgttgaggattttctgcaggtcgtggcggcttaccgcaatttcgtgcagcagaagtaaataaatctggcggagcctgggagctccgccagagccgttaaacagctggcatattgcgcccgtaataaatctcgcgcatttctttccacagcgcagcggtaatttcctggcgctcgctgtcggttaagtcttccggtttggtgtggaacatgtagtgcttaaggtcgaactctttaagcaacatcttggtatggaagatattttcctgatagacgttcacatccaccatgtcatacagcgccttcatatcgtcagacataaagttctgaatgctattaatctcatggtcgataaagtgcttcataccgttaatgtcgcgggtaaaaccgcgcacgcgataatcaatggttacgatatcggactcaagctggtggatcaggtaattcagcgccttcagcggagaaatcacgccgcaggtagagacttcaatatcggcgcggaaggtacataaaccgccttcaggatgactttccgggtaggtatgtacgcaaatatgacttttatcaagatgggcaacgaccgtttctggcagtgggccggggtgttctgttttgtcgatgagtttcgggtcaaccggttcttcactcaccagaatagtgacgctggcaccctgtggttcgtaatcctggcgggcgatgttaagaatattagccccgataatggaacaggtttcactcaggatttcggtcagacggttggcattatagagttcatcgatataagcaatataaccgtcgcgctcttcggcagttttggcgtagcagatatcgtaaatacaaaaactcagacttttggtcagattattaaagccatgcagtttcagttttttcaatttcttatcttctccttaggacggctgactagccagtgcgtcttgcagatactgaggtaaggcaaaagctgccgtatggattgccggattgtaataacggcatttcaggccagaggcgagaaaacgcgcctgaataatttcggtactgagatggcgtaaggcgtcgttatctgtcgcccatgcaaaagtcatgataccgccgtaataggtcgggatcgccgcctgataaaagccaacgtcgctgaagtaatggctgagtttgcgatggctgtcgatggcttcttcctgctgtaaaaagcagacgccgttttgtgcgacgaagataccgccaggattcaggcaacgtttgcagccttcataaaatgcgctagtgaaaaggctttcgccgggaccgataggatcggtgcagtcggagataatgacatcaaaggtctggctggtttgattaacgaaattgacgccatcgtcgatcaccagcttaaagcgcggatcgtcgtagctaccggcgttatggttgggtagatactgacggcagaagcttacgacacccgcatcgatttccaccatcgtgatactctcaacgtttttatgtcgggttacttcacgcagcatggcaccgtcgccgccgccgataatcagcacatgtttcgcgtgaccatgggccagtagcggaacatgggtcatcatctcatgatagataaactcgtcgcgctcggtggtttgtactacgccatccagcgccattacgcgaccaaatgcagcgttctcaaaaatgatcagatcctggtgatcggtcttttcatgatacagaacgttatctaccgcaaagtactgcccaaactggtcgtgtagcgtttcatgccactgttttttttcggccatgggttgatacctcctttgttaacacccgtaaaaaaagggcgcaacataatagctaacattgaccgcggatgcacggtcaatatttctacaaaaaggtatcagggattatttgacgtaggcaagcaggcttaaggaatcgcgggccagggctttgcattttttagcgacgggaatgccaatgccgctgagatcgcggtagctgtcttcaccgagggctttcatgtcgaaggtgtcgtaattactgaggtcccactggttttgctgagcgaaaaagaccagtgcgcgacgaatttgcccgttaggtaagttctggtaaccacaatcgttcttcagaaagacaaaaactgccgttaaatcggccatatcttcggcttcagactcgctgagcgcgtaactgtttgcgcagacggccatcaggctgccgaataacactgttctgaaaaacgtcttcattgcttctaccaggggcttaaagaagataaacgttagcacactgcgagcgaggcgacgaccattattgtcgattaaattgtgtctgcggcttgaccttcccgtaaggggaaggactatgctcaacgtttgattttgtttcgcctgcttaagaataaggaaataactatgcaacgtcgtgatttcttaaaatattccgtcgcgctgggtgtggctagcgctttgccgctgtggagccgcgcagtatttgcggcagaacgcccaacgttaccgatccctgatttgctcacgaccgatgcccgtaatcgcattcagttaactattggcgcaggccagtccacctttggcgggaaaactgcaactacctggggctataacggcaatctgctggggccggcggtgaaattacagcgcggcaaagcggtaacggttgatatctacaaccaactgacggaagagacaacgttgcactggcacgggctggaagtaccgggtgaagtcgacggcggcccgcagggaattattccgccaggtggcaagcgcagcgtgacgttgaccgttgatcaacctgccgctacctgctggttccatccgcatcagcacggcaaaaccgggcgacaggtggcgatggggctggctgggctggtggtgattgaagatgacgagatcctgaaattaatgctgccaaaacagtggggtatcgatgatgttccggtgatcgttcaggataagaaatttagcgccgacgggcagattgattatcaactggatgtgatgaccgccgccgtgggctggtttggcgatacgttgctgaccaacggtgcaatctacccgcaacacgctgccccgcgtggttggctgcgcctgcgtttgctcaatggctgtaatgcccgtagcctcaatttcgccaccagcgacaatcgcccgctgtatgtgattgccagcgacggtggtctgctacctgaaccagtgaaggtgagcgaactgccggtgctgatgggcgagcgttttgaagtgctggtggaggttaacgataacaaaccctttgacctggtgacgctgccggtcagccagatggggatggcgattgcgccgtttgataagcctcatccggtaatgcggattcagccgattgctattagtgcctccggtgctttgccagacacattaagtagcctgcctgcgttacctagcctggaagggctgacggtacgcaagctgcaactctctatggacccgatgctcgatatgatggggatgcagatgctaatggagaaatatggcgatcaggcgatggccgggatggatcacagccagatgatgggccatatggggcacggcaatatgaatcatatgaaccacggcgggaagttcgatttccaccatgccaacaaaatcaacggtcaggcgtttgatatgaacaagccgatgtttgcggcggcgaaagggcaatacgaacgttgggttatctctggcgtgggcgacatgatgctgcatccgttccatatccacggcacgcagttccgtatcttgagtgaaaatggcaaaccgccagcggctcatcgcgcgggctggaaagataccgttaaggtagaaggtaatgtcagcgaagtgctggtgaagtttaatcacgatgcaccgaaagaacatgcttatatggcgcactgccatctgctggagcatgaagatacggggatgatgttagggtttacggtataaaaagaccgtattcggaaatatgcccggatctctccgggcattaaactgatgacaaacgcaaatctgcctgatgcgctacgcttatcaggcctacgctagctgtgcaatccattgattttgcacaattttgtaggctggataaggcgttcacgccgcatccggcatgaacaacgcgcacgttgtcagcaatctgagcaagtcttacttcacatcatccggcagcgcataagccacaatatagtcgcccatcttcgtaccaaaactaccgtgaccgcctgcggagatcaccacatactgcttaccattcacttcataggtcattggcgtagcctgaccacccgctggtaaacgaccctgccacagtttttcaccgttgctcatgttgtaagcgcgcaggtagttatctgccgtagcggcgataaacagcacgttacccgccgtggagattggcccgcccagcatcggcatacccatattgaacggcaccggaaccggcatcgggaacggcatactgtcctgcggcgtaccaatacgtttcttccacaccacttcattagttttcagatccagcgcgctgatataaccccatgctggctgtttacatggcagaccaaatggactgaggaacgggttgagcgtgacaccatacggtacaccgtactgtggctgaatgccggattccgtacccgtgcctttggcatctttcggctgctccatcgggttgccaggaccacgcgggatcagtttgctaacaaacggcagtgccattgggttggcaatcgccacttcacgatttggatcaacggaaatcccgccccattcgaacatccccaggttacccgggaagaccagcgtaccctgttcagatggcggggtgaaaatgccttcatagcgcatctggtggaacatcacgcggcacaccagttggtcaaacatggtggctccccacatatccgcaccgctcaaatctttcgtcggacggaagctcagttcagaaaacggttgagttggggttacgtaatcgcctttcgctgcaccttggggaaccggtttttccggtgccggaaccaccagttcgccattacgacgatcgagcacaaaaatgttgccggttttcgccggagcgtaaataactggcactttctgaccattaacggtgatgtccgccagcgtcggctgtgccggaagatccatgtcccacaggtcgtggtgaacggtctggtagctccacgccagtttcccggtagtggcattcagcgccagaatgctgctggcataacgttcctgttccggtgtgcggttaccgccccagatatccggcgtggtcacgcccatcggcagatagaccagatccagcttcgcgtcataggccgctggtgcccaggagtttgggctgttaaaggtaaaggtgtgttcgtcagacgggattgcgttcggatctttcgcgccgggatcaaaagcccacagcagctccccggtgttgacatcaaaaccacggatcacgccagacgtttcgcgggtactgaagttatcggtaacactaccggccatcacgatggttttatcggtgataatcggtgggctagtcggttcatacagacccggtttggtgtctggcatattgctttgcagattgagcacgcctttattggcgaaggtttcgcacagtttgccgttttcagcgttaatcgcaatcagtcgaccatcattgaccggaagaatgatacgacgcgggcaatccgccatcacttccgggctagcggtttctgctttggcttcatgataagagacaccacggcaggttacgtgctggaaagactcgttggttttcagctcaggatcgtaatgccatttctctttgccgctggcggcatcaagcgcaaacaggcgctggtgagcggtacacaggtaaagggtgtcgcccactttaatcggcgtcacttcattggtgatttcacccggatcgttcggctgcttcacatcgccagtacggaacacccaggcttctttcagattatggacgttatcggcgttaatttgtttcagcgggctaaagcgttgaccttcctgattacgaccataggcaggccagtcctgatcggctacgggggagatagcttcagcaggtgtggcatcggcgcttaaggtgccgttgatctcctgcggatcgttaaatccggcccaggtcaggataccaccgctaatcagcagtgcgaccaccagtgcggcaactgcgccgctggcaggaatgaccaggcgacgccagacaaacggcaggatcagccagatgccgaagaagaccagaatgtcgctgcgcggagtcagcgcccagaagtcgaaaccaacttcccagacgccccaaatcatggtgccgagcagcagggctgcgtatagccaaagcgcggcgcgtttactgcgccacagcatccaggcgacgccgagcatcacaaggccagcgatagggtagtaccaggagccgccaatcgcgaccagccagcctccgccaatgagtagatacagcccgcaaagcgctgcaaaaagggctgttagcgtgacgagtaatcgtcggctgcctgtattgttaattgccataaagagacaccatttcaattcattaatattttagtagcaattaattataggttttaacatgtgtgatcgtcatcacaattcgagctttattaacagattccgcgaatgaatagttttactggtatactgcgtgtcttgcgctttgttgcggtgccaaaacctgcccgtgcgaagtgatttgtttttaaatcatatggttagagatatgaaacatactgtagaagtaatgatccccgaagcggagattaaagcgcgtatcgccgaactgggtcgtcagattactgagcgttacaaagacagcggcagcgatatggtgctggtgggtctgctgcgtggcagttttatgtttatggcggacctgtgccgtgaagttcaggtatctcatgaagtcgactttatgaccgcctccagctacggtagcggcatgtccaccacccgtgatgtgaaaatcctcaaagatctggatgaagatatccgtggcaaggacgtgctgattgttgaagatatcatcgacagcgggaatacactgagcaaagtgcgtgagatcttaagcctgcgcgaaccgaagagcctggcgatttgtacgctgctggataaaccgtcccgtcgtgaagtgaacgtcccggtagaatttatcggtttcagcatcccggatgagtttgtggtgggttacggcattgattacgcacagcgttaccgtcatctgccgtatatcggcaaagtgattctgctggacgagtaagtgtgaagttgccggatgtgttgcatccggcatggcatttttatttgtggttggcgtgtttcagcttgaggttggaaatcccgtgacggtaacgttgctcaagggtttcgcggttggtggcggtaacatccagatcacgcagcaagccgtcgtgaatgccgtaggcccagccgtgaatggtaactttctgcccgcgtttccacgcactttgcataatggtggagtggcccaggttatacacctgttccatgacgttcagttcacacaaggtatccagacggcgctcttgcggcatttcgccgagcaaactgctatgtttgaaccagatatcgcggatatgcagcagccagttgttgataagccccagttccgggttttcaactgcggcttgtacgccgccgcaaccgtagtggccacagataataatgtgttcaacttcgagtacatccactgcatactgaaccacggaaaggcagttcaggtcagtgtgaatgaccaggttagcaacattacggtgaacaaagagttcgcccggttcaagaccggttaaacgttctgcaggaacgcgactgtcggaacatccaatccatagaaagcgcggtttttgcgcttgtgccagtttctcaaaaaacccgggatcctcttccaccagcattttactccatagtgcattgttgctgatgagtgtatctatgtctttcatggaggttaacgacctgtaaccaaataattacgtttggctaatatagggcaactccgggacgatttaaaccacagataaagtgtaagaacgtaaggtaagtaaaaatttatgaccattgcactggaacttcaacagcttaaaaaaacctatccaggcggcgttcaggcgcttcgtgggatagatttgcaggtcgaagcgggtgatttttatgcgcttctcgggccgaacggggccgggaaaagcaccactatcggtattatcagctctctggtaaataaaacctccgggcgggtcagcgtatttggttacgatctcgagaaggatgtcgtgaacgctaaacgtcagttgggactggtgccgcaggaatttaacttcaacccgtttgaaaccgtgcagcaaattgtggtgaatcaggcagggtactacggcgtggagcgcaaagaagcgtacatccgcagcgaaaagtatcttaaacaactcgatctatggggaaaacgcaacgaacgtgcgcgtatgttatctggcgggatgaagcgccgtttaatgattgcccgtgcgttaatgcatgaacctaaactactgattctcgacgaaccgaccgcaggcgtggatattgaacttcgccgcagtatgtggggctttttgaaggatttaaacgacaaaggcaccaccatcattctcaccacacactacctggaagaagcagaaatgctgtgccgcaatatcggcattattcaacacggtgagctggtggaaaataccagcatgaaggcgctgctggcgaagctgaaaagcgaaacctttattctcgatctcgcaccgaaaagcccgttaccgaagctcgatggctatcagtatcgactggtcgataccgcgacgctggaagttgaagtgctgcgtgagcaggggatcaacagcgtatttacgcagttaagtgagcagggcattcaggtattaagtatgcgtaacaaagctaaccgtctggaagagctgtttgttagtctggttaatgaaaaacaaggagatcgcgcatgatgcatctttactgggtggcgctaaaaagcatctgggcgaaagagatccatcgctttatgcgtatctgggtgcagacgctggtgccgccagtcatcaccatgaccctttactttattatcttcggtaacctgattggtagccgtattggcgatatgcatggcttcagctatatgcagttcatcgtaccggggctgatcatgatgagcgtgatcaccaatgcctacgccaacgttgcgagtagtttttttggtgccaagttccagcgtaatattgaagagctgctggtagcgccggttccgactcacgtcattattgccggatatgtcggcggtggcgtggcgcgtggtctgtttgttggcattctggtgacggcaattagtctgttttttgtgccatttcaggtgcatagctgggtattcgttgccttaacgctggtgctcacggcggtgttgttctcccttgcgggtttgctgaacggtgtgtttgccaaaacgttcgatgacatcagcctggtgccaacctttgtgttaacgccactcacgtatttgggcggggtcttttacagtctgactttgttgccgccgttctggcaagggctgagccacctgaacccaatcgtttatatgatcagtggtttccgctacggcttcctcggtatcaatgatgttccgctggtcactacctttggcgtactggtggtctttattgtggcgttttatttgatctgttggagcctgatccaacgtggacgtggtttgcgtagctaaggctatttcctctcctctggatttgggggagaggagttttgacggctatcaccctttatcaacaatggtcagggtagactgattttcggctaaggaggaaggcgatgttaggttgggtaattacctgtcacgatgaccgggcgcaagagatactggatgcgctggagaaaaaacatggggcacttcttcagtgccgggccgtgaatttctggcgcggattaagctctaatatgctcagccgcatgatgtgcgatgctctgcatgaagcggactctggtgagggtgtcatcttcttaaccgatatagccggagcgccaccgtatcgcgtggctagtttattaagccacaaacactcccgttgcgaagtgatttctggtgtcacgttaccgttaattgaacagatgatggcttgccgtgaaaccatgaccagtagtgagtttcgcgagcgtattgtcgaactgggtgcgccggaggtgagtagtctttggcaccaacaacaaaaaaatccgcctttcgtcctcaaacataatttgtatgagtattaacccgcgattctgatggcgcttttgctacaataaaagcgttgtttcaccctcggttattttttcatgtacaaacaagctgttattctcctgctgatgctgtttaccgcaagtgtcagtgccgcgttacctgcccgttatatgcaaaccatcgaaaatgctgcggtctgggcgcaaattggtgacaagatggtgaccgtggggaatattcgggccggacaaatcattgccgtggagcccactgccgcaagttattacgcatttaattttggctttggcaaaggttttatcgataaaggtcatctcgagccggttcaggggcgacaaaaagttgaagacggtttgggcgacctcaacaagccgctgagtaatcagaacttagttacctggaaagatacgccggtctataacgcgccgagtgcgggaagtgcgccatttggggtactggcggacaatttgcgctacccgattttgcataaactgaaagacaggttaaatcaaacctggtatcagatccgtattggcgatcgactggcctatatcagcgcactggatgcccaacccgataatggcctgagcgtgctaacctatcaccatattctgcgcgacgaagaaaacacccgttttcgccatactagcacgaccacaagcgtacgcgctttcaataaccagatggcctggctgcgtgacaggggatacgcgacactgagcatggtgcagctggaaggctacgtgaagaataagatcaatctccctgcgcgagcggtggtgattacctttgatgatggcctcaagagcgtgagccgctatgcgtatcctgtgttgaaacaatatggcatgaaggcgacggcgtttattgttaccagtcgcatcaaacgtcacccgcagaagtggaacccaaaaagcctgcaatttatgagcgtttctgagcttaacgaaattcgcgatgtatttgatttccagagtcatacccattttttgcatcgggtagatggttatcgccgacccatattactgagccgtagtgagcacaatattctgtttgattttgcacgtagtcgccgcgctctggcgcaatttaatccgcatgtctggtatcttagctatccgtttggcggatttaatgacaacgccgtgaaggcagcaaacgatgccggatttcacctggcggtgacaaccatgaaaggcaaagtaaaaccgggggataatccgttgttactaaaacgactttatatcttaagaacggatagcctggagacgatgagccggctggtgagtaaccagccgcagggataacaatcaagcaacctgtaccggaatcgctttcgcggtacgtttcatttcattgtcgccttcaaaataggcgacgttgggtcgccaggtgcgagcttcttcatctggcatggtaacgaagctggcgatgatgacaatatcgccgacactggcgcagtgggccgccgcaccgttaacagaaataattctgctaccgcgttctgccgcgatggcataagtggagaaacgcttgccgttggtgacattccagatatcaatggcttcgttttcgagaataccggctgcgtcaagaaaatcctggtcaatggcgcaagaaccttcatagtgcaggtccgcatgagtcactttcacgcggtggagtttgccctgcagcatcgtgcgaatcataacttctacctttctaccctgtcgttaacgaagcaggcgatgcctgctttgaggaaattctcacgcagtattgcccgatttttgtttagtgtctactcatctgacggcatttgcgtcagcagtttgcgtaccgcgccgaagcgtgccatgtatcgcctgtaacgaattgatatttctctgaacgctgctcggtaaacaataaagaggtggctgacgatagcgcgccttgactggatactgccttcacgcaaagccacacggaagacagggaagatggatgcaccgagtaccacaccgcatgacgcggtatttaaacaatttttaatgcatgcggagacggctcgcgactttctggagatacatttgccagtggaattacgcgaactttgtgacctcaacacgcttcatttagagagcgggagtttcattgaagagagcctgaaaggacacagcacggacgtgctctattccgtgcaaatgcagggcaatcccggttatctgcatgttgtgattgaacaccaaagcaagccggataagaaaatggcctttcgcatgatgcgttattctatagccgccatgcaccggcatctggaggctgaccacgataagctgccgctggtggtgccgatactgttttatcagggcgaggccacaccttatccgctaagtatgtgctggtttgatatgttttacagcccggagctggcgcgacgcgtctataacagtcctttcccgctggtggatatcaccatcacaccggatgacgaaatcatgcaacatcggcggattgcgattctcgaactactgcaaaaacatattcgccagcgcgacttaatgttattgcttgagcaactggtcacgctgatcgacgaagggtacactagcggaagtcagttagttgccatgcaaaactatatgctgcaacgcggtcatactgaacaagcggatttgttttacggtgtgttgagagacagggaaacgggaggggagtctatgatgacgctggcgcagtggtttgaagagaaagggattgagaaggggattcagcagggaagacaggaagtaagtcaggaattcgcccagcgtcttctgagtaaaggaatgtctcgggaagacgttgcagagatggcaaatttacctcttgctgagattgataaggtaattaaccttatttaagttacctgtgttatgacagatgacgtggggtaaattaataactggcgccatcagccgtagcgccagttaagtattacgccagctcgaccattttgttgtcgatcaggcgagcatcgccaagccaggcggctaccagaattactgcccgtttgctggtttcagaaacttccagcaatgtgtcggcatcgcgaatctgaatatcatcggcgcggaagcctttttcattcagttcttgccccgcaatggtaataatttcatcgagatcccgttccccagcctgcaatttgtcagcaatgctacttaaaactttgtacagaccaggcgcaattttgcgttgttccgccgtcagataaccgttacgggaacttagcgccagaccgtctttggcgcgcataattggcacaccgacaatctcaatatcgaagcccatatcggcaaccattttgcggatcagcgccagttgctgaaaatctttttcaccgaagcaggcgatgtccggctggaccaggttgaacagcttgctgacaatagtgctaacgccgcgaaaatgtcccggacggctggcaccttccagcatggtgctaaggccaggaacgtcaacgtaagtgtgggtttcagtaccgttcgggtagatctcttttacgctaggggcgaaaactaaatccactttacgtttgtttagcttctcgcagtcctcctgcaaggtccgtggataacgagccagatcttccgggcggtcgaactgcatcgggttaacgaaaatactgacgacgaccacatcggcgcgggctttggcttcgtcgaccagcttcatatggccatcgtgcaggttacccatggtaggcaccagcgccacgcgcttgccttccatacgcaggcggcgaatttgctgacgcagcagcggcagggtttcgataattaacacaacgtgactccttaatggaaactgtgttcttcgcccggataaacgccggactccacttcagccatatactgccgcacagccgcgcggatgtcgcccgtttcggcgaggaaatttttagcgaatttaggaatgtgaccgccggtaataccaaaggcgtcgtgcatcacgaggatctgcccgtcagtgacgttgcctgcgccaatgccaataaccgggatcgccagtgcttcggtaatacgttttgccagttcaaccggcacgcattccagcaccagcagctgtgccccagcagcttctaaggctaatgcatcgctgagcagttgatcgcccgcttcatcgccgcgcccctgaactttgtagccaccgaaaatattcacactctgtggtgttaaacctaagtgaccacatacaggaacggcacgttcggtcagcatttgtacggtttctaccagccactcaccgccttcaattttgaccatgttagcaccggcacgcataaccgttgcggcgttttcgaaggcttgttccggcgtggcatacgccataaacggcaggtcagccagcagcaggcagtttggtgcgccgcgacgtacggcggcagtgtggtaggcgatatcggcaacggtaactggcagggtggagtcgtgcccctgaaccgtcatgcccaggctatcgcccaccagcatgacgttaagcccttcatcagcaaagagtttggcgaagctatagtcataagcggtgatggtcgcgaaacgttttttttcctgtttgtacttctgcagtaaggagatggtggtcggtttcataacgtatcctgataaattgatgttgtgctgtctggcattttatcagtcacattggtgggggcaatgatttatccgtagcagcactgccagaaggtgacagtgctgctacgttatcagggataggttacctggaaagtactggtggctttaaattcgccgggttcgatagcaatattcccgtcttgctttaatgttgcctggaaatgaagaggctgacttgtgccgttaccttgattagggtaaaccccatcggaggtgtcatcttcggtttcataatctatataaacagaattcgtatcattaggttttaatgtcattagcggatttttactggttgctaaaccttcaatgagtacgccaacgcctttggcggcagtgcttccagtaagcgtattaccaagcagttgtgtgttttgagtacctacttttccagtgacgagttttgtttcaatattacgcacacgaatacaattctgaaggctgatatcaaagggaacaggactagcgccatttttaattgtcccagagctatattctcccattctaaccgtactaccattgacacttggcccggtaagtatggaggtaaaacatgttggtaaggttaatttgacattattcagtgtgaaattgacataaatgtggttgctgtgatctacaacttttgtaccaggactgtaggccttaaagctataaaggtaattactactactggataactggacttgctgattaagtgtaggatcgaaattagtatctgtataaaattcaacagttatgttgtgtactataccaccaatagcccaaaacttatcgtagtcgtctgctttgttgcaacccttagtttgtagatcgctgtctgtgacggaaaagaaaaattcttggttggaaggatctccgatatagattcctgggctttgaatgtcagttattgtatcgtatgcagaccagaccctacttattaacatggtgtaatacagaccaggaacagatgtattaaatagtttatgtccgccataatctttaccactatagaccatggcattttcaatagttattggaccaggattcgctctgccagatgtattgcagtaaagaataccaccaccggtacctgtatccaggtaactccagtacatttttaccccagtcgggccgagctgcgtgggtttataaaaaaccaagttgcttgctgtacttgtgtaattaaaggtcatctgtgcggcagtggaggggcctcgatagttatcaactcctgcattatttcccacaataaaacttgtatatgcactgactgtattacaacaagaatacagtgctaaaaaaagaatgtacctgaagatagtcttcatttttactccaatgtttctttattgttatggtttgcgctgtttttgtttgttattcgtagtaaatatccactaacacatggctcataagttgaccagatgtaacactcaatgcaggatcgattttttgcattcgggtgctaaatttccaggaactaccattcatgtcatcgctcattactggataaacggaacgagatccgccactagcattaagaacattgaatgtattcgcgctatcctgagtagaaaatataactactcctacattacttgctccactgctaatttcattagcaaatatttgcctagagccagcagccatgacaccgctaagggctctaaaatcaatatgtaactgatttagcacatcgccagttccctgtaatgcacagtcggatacagtgatagtgaactcttttccacctggttgataactttcaggagtaacattaccactaaaatatcccaccccaacgacgccaagatcaatattaccctggttactgattccgcttttgcaggtgctgttttttacattggcaacaaggtcaatatcctgtccagcaatggctggacaggcgatgcaaaacagtaaactcagaaacagaattattctcttcatcagcttacgttgagtgggatgcatatatagttcctgaatctgtaagtctgttagttataggttactgtaaatgtggctggtgcagaaaacttacccgcagtgacattgtttacggttttatttttttccacgaccaggcgtgcactcatcggataataaacgaccgcattggctgcagtggagattgttacctcttgacttgctggtgttacacagctaaattgtgttgcactccctgttgccggagttacagtgctccagacttcaacggcgacagcacttgctttatctgcggctgtggaaccatttgcaaaccccgcaccgtcattagcagttccctcgcatgtggctcgcttggttaattttatttgcgcttttttattggggatacccgcacagtctttgaatttgagtttgaatgtttttactttggtcttggcattgatttcagaaatatatacatcaccaaaatcaacaacagaaatgtcctgatcagagtcatttactaatgtagcggtacaagtacccatttctacagtagtaataacggtcagtccaatactgtctgttgccgcataagagagtacgctgaacaaactggcagccaaaacgacactgctggataatccataacgtaaatttttaaatgtcatcataattatccttcttattgatagatgaaattaaacgtcgccagtgcacgaaaattccccggtacgccttgccctgcatctgtttcacgtagcgcaacggtcatttcaagacccttatcgggctgcatctcgtctgtgctccagcgtatcttttccgcactgttaggtttaaggaaagtggcatcatcagtagtccgttttttgaaacccataccgatattacttgtcgtgctagaactatcaccagactgcggtataataagcttaggactgctactacttgcatttccggtcagagtggtatcaatccaactgatgccactgctgcacccactggcaaccagtttaaaatcagcctgagattctgtcgttttattcgcgatcttatccagacccatcttagggattctcaatgtgtagttattattgccatcattcgtgacgttattaccagtaagtgtgatgttacaggttgtcgctttgacagtggctgtaaactctacattaatatccgttgcaaatacactgggacttaataatattcccatcagtatcactattttatgtggcgttgtttttatcatttgacgtcccttgtagttactgaatctgacaccgaattccattcagaataatagattgtgctattttttctgcttctgggctttgttgataatgcgcaagacaacttacgggtttactttgttcgagccatttaatgctgatatttccctgctgctcaataccacgaacaaatgcttgtccaccctgtccaacattaccaatgacattgccttgctcatcataaatatctgcagcaaatggaatatttttaccatcacttcgtgtgatgttcataatggcactttgcccttgcacggtttcaaaatcagcaaagacgacactaccctgacgcggtacagctactgcactggtactttttaattcaacatcgttctcaagatcgttgatatccagcgcgatacggttttcatgataaggagaaagagcgctggtgacaccataaccccatcgatcgatagtactgttgccataatttattcgcgctccttgagcacctggagcctgaactaccgccagtgtatcggagtcgctaaaactatcattactgaaagtcagtccaccgctatgcaatacaaaaccaccgtcggtgctgagagaaacttgacggctgttatcgctatttgcagaaatactacctgccagcgttccccatggactctcatagctggcataacccccaacataactcaaatctttgctggctttattcatcgtatagccagtattcacgctataactgacgcgagcgttatcgctatagccactgctgctaacgttgagttggttattacccttaaagtcactgcttatttgagtatcaatactctggaaaccactagtacgttgttcagtgccaagtaatttttcaattggaatggtgaaactaagataaacgctatcgtcagtgtcgccgtcttcattccaactacgctgggcactgacactgtagctgccccaggatgtactgttactgtagccaatagagtaattgctacgattttgtccggaagcccagtaatcggaccaacttccggaaagataaaaactaccgtaatcttttttctcaaatttcaacggttggttaatactgaccgtaacctgatttttcatgcgactgtaattacgcatggatttcggttcaagatcttgttcgggatgtttcacttcatcaattagagttagtgcatcattaagaccaaggtaattctgtgtgctatagcgataggccgcgatattcagactagtacttgtttcttcgaataacttgttccaggaaacacgataactttgcccctggtatgttttatcatccgggatacgaacattggaatgagtcacatcgaaagaaaatgcaccaacactagtattcagaccaagacctaacaaaccagcggtatagttattatcggttatctgaataccggtataacccgtcagatagttattcaggccgtagtagtagcttgcttgaaataaattaggctcatcctgaatatcatcttttaagacctgaccgccgctaatatcccaacgtccaacgccagggcgtaacatttgaacaacggaactgaaaggttggctgaatgtccgcttactgccatcggattcttcgatggtaacaataagatcgctgccgtacccactcggactcagatcatcaatgacgaaagcgcctggcggcaccgtcgtttcataaatcttatagccaccttgcgtaatagtgactttggcgttggtattggcaacgccatgaatgataggcgcaaagctggctaaagtcggaggcaacatgcggctgtcactgtataaacgaatgcctcggatactgacggaatcaaaggtttcgcccgtcgtataagactcaccaagaatgagttgagaacgcaggctggcgatatcacgctgaacataccgattcttaaaatcataattactgccagaatcggtcatccagttgtagttgccgctggcacgcagtcgccatgcacctaaattcatcccaccgttaaatgcagcataaatgctttcattttttcgaccaggggtttcactatgatatccgttgaggttgtaactcaacatggccgcattaatgccgttttcccataagcttggatcaacatagttttggtaatttttcattacccaggcttgaggaacgtctatatccagacgttgatcgttaacgtcataacgaacagaagcctgagggataatttccgtcaaattgaggcaattgccgagcgtttcatccctggcaagcagaacggctttttcgttatttatatcgggagaattaatatgaaactgcaataaattctttaatgtgatacaagcctgggcgttcttttttccttcaattgcgacaaatgtaatactttggttaatgattggttggtcgtttacataaacactgacgtcgtaaacacccggtatagcggggttaccttcactgtaccggctgagatcaatattagatgcattctgccccatcaggaaggtatggtcatattcaacgagttcagcactgaaagcagtattgcaatacagcagcgcgcaaaacgtggcgatacgggtcagatgatgataatttttagtatattctatagtcacgctatgcttcctgcggaattatatccttgcctgattacagcctggcattaccttcaattgcgccaccaaagtcattaatggcgtaaaaatgcacttttgcagaattcgctttgccattaaggccattgactttcatgacctcatcactaaatggtgcaatcattttcacatcaatcggatagcgtttaccgctagcttctaaatcaccactgctaaaagagacgtagtaaggggttggattggtcactcgtaaactcgccttaccttcactaccactccagaaccacttcagggctaacggggcttcagagggatttcccttcaatccatccgggcgatagaaaagttttatacgtgtgcgaaatgccagttgcagcaggctttgattcgcgaccttttctgcatctggttttggtggaacttccagtacgttaaaccagaacacgctctctctgtctttaggcagactggtgctggctgtgtacattaatttgattgtttgcccacgtttggcatcaatacggcttactggcggcgtagcagtaaaagggactgtaatactgccaggctcagcgttgtcatcgccagtatctaaccaactctggacaagcaacgggttattccctttattttccagacgtacgttgacacttttttgatcgcttttatatattacgcgagtaccgctaatgacaatgtccgcaatagagctactactaaaagccatacaggttacgaagcataaagctgttgtatgtttggtgttaaaaaacataaaccatccctgatagagttaattaaaacagggaataatataaaatagaaattattattccctgtatattcattcaatcaatttaactggtgaatacttactgataagtaatggtgtatgcagtgttagtttttacataaccagcagttgctgtttggtctgcgacggcacgaacgtaagacgctttaaaatcataaacagcagattttgtcgttgcatccagggctttagtatacacatcgccagggttgttaatttgaacctgtttgatagtggaaccatcaatattgtgtagagcgatattaacgccgtcagatgggttgttaatagacatgtcgttgttcaaagtccctttgctgttaccaaagaaaacagaaccgaaggtcattttagccgtgctacctggattcggatttgctttgctgcagtcaacggtgatgctgaaaggtttagctttagcgccaacggtgtcattcagtacgccagcatcgatttcaccaacggttgcggtttgcagcaggatcagaccatccttgttaccgccgtcaacgcgggtttcacaggtgttatcaacaaccagaccactgatatttaactgaccgccgtccatatcagcagaagcagtacctgcaaccatcgccagcataagaccagacagggcaaaacctaattttttagacataaaaatcctttaataaaattccattagtcagactacatgtttgaagaatgactattcatgacacaaataggagaaacaaatgttagatattaatgagcaatgatatttgttacccaaatttacaaccattgttcattaggtcgcctattgtgcactttagaagcttttgaacaaattaaatttacttaattcaaaattaagtaaaaataagttcacaagtgcaattggttagggtatggagatgggattgatatttatttataggaagttatattatttccgcaaagagatgtttaaactaaaatcgtaattaaggaaagagatgagatatgattttcagaaaatatttatattcgcaatataaataaattaccatttgtttaatttgtcaaatgctcttgtatgtaagatttgacgcaacatctccccatcaggaaacaccaactccggcgcgatttcaaacagcggccacagcataaatccacgattcttcatatcgtagtgcggaacggtcaggcgttcagtatttatcacttcattaccaaacagcatgatgtcgagatccagcgtgcgtggtccccagcgttcagctttgcggacgcgaccttgctgcaattcaatacgctgtgtgtgattgagtagctcttcaggtgcaagagaggtttccagcgccacggctgcgtttaagtaatcgggttgatcttgcggccccagcggtggggtgcggtaaaagctagaaacggtaagaatgtggctttcagggatatcgcctaatgctttcagggcagcattgacctgctccagcggagaggccagattgctgcctatggcaatatacgccactgtcatgcggtaccctcacgacgtggtgcgcgtttgcgtggacgacgagtacgacgacgcggactcggttcttcatccagctcgttgagcatccctttttggtctggtggcgcggaaacctggaactcaccccaccatttcaccagacgctgcagttcagcgttacgctcaacttcagctcgcaaggccaacaggtcataagccgcacggaacttaggatgctccagcagtttccatgcgcgtttaccctgacgacgggacatacgcaactgcaactgccagatatcgcgggttaatgtcgtcagacgtttcgggattgccagactacggcaggcttcgtccagcacgtcgttcatcgccagcgcgaaagcgtcgtgataggtcaggccgctttcctgggcgatcttctgtgccgtctccagcagtgggtaccagaacatggcggcaaacaggaacgccgggttcacgcgcatatcgttatggatacgcgtatcggtattcttcagcacctgttcaatgatccgctccatcgggctgtcgccattttccgtgaagtagcgggtaatggtcgggaacagcggctggaacagatgatattcacacaacagcttataggtttcgtaaccgtagcccgcttgtagcagtttaaggctttcttcaaacaggcgtgccggtgggatatcgttcagcagggtagcgaggcgagggatcggttctgcggtttccgggctgatgcgcatacccaatttggcggcaaaacgtaccgcgcgcagcatacgtaccggatcttcacggtagcgcgtttccgggttaccaatcagacggataacgccgtccttcagatccttcatgccgccaacgtaatcacggacggtaaaatccgctacgctgtaatacaggctgttgatagtgaaatcgcggcgctgggcgtcttcttcgatggagccgaaaatgttgtcgcgcagcaacatgccgttttgcccgcgttgggaggtcgtgcggtcgctgacgttaccttcgtggtgtccacggaaggtcgcaacttcgataatctccgggccaaacattacatgagccagacggaaacggcgacccaccaggcggcagttacggaacagtttgcgcacctgctcaggcgtggcgttagtggttacgtcaaaatctttcggctttttgccaagtaacaggtcgcgcacgccgccgccaaccagccaggcttcgtatcccgctttattgagcctgtacattaccttcagggcattttcactgatatctttgcgggaaatagcatactgctcacgcgggatcaccgtcacctgtggacgggcgactgcctgttcagcctcgctttcctcgcggcttagcaccttgcggcaaaaattagcgactcgggtaaaaatagtacacctcggtagtgtcaaacatcattcaggacaaaaaaatagcggctaatcatagctcagcaactcgcattactgaatgtactatttacaattgcgctctcgggcacggcggtaagccgccagtttttgacggcactctgaaggatttgctcgacgctgaaatcctgccagtgtgcttctgcctgctgccccagaaattgaagtgccgcgattagtaccgggcgtggatcgcctttcggcaacgcaggcgcatgattctgcttggaaagtttagcgccttgtggattaagcgccagcggcagatgaatgtaatctggcactttccagccaaaaagctggtacaggctgatttgccttactgttggttcaatcagatcagccccacgcactatttctgtaacgccctggaaatgatcatcaaccacaacagccaggttgtaggcgaacaacccatcacggcgatgaatgataaaatcttcccgtgccagtttttcgtcggcgtgaataatgccgcgcagctggtcagtaaattgcgtgaccggatgctgctggcggatacgcactgcggcgttgtctggtccatgatgcaacacccggcaatgaccgtcgtaaataccgccaatgctttgaatacgcgcacgcgtacaggtgcagtaataacttagtccttgttcatgtaaccaggcgagtgcttcacgataggcgtcgtgacgttggctttgccagagaacatcgccgtcccagtgcagaccgtaatgttccagctggcgcaggatagtttctgcggcaccgggaacttcacgaggcgggtcgatatcttctatgcgtaccagccagcgaccttgccgggcgcgagcctgcaaatagctgccgagcgcggcgatcagagagccaaaatgaagctcgccggaaggagagggggcgaagcggccaatatactgtgtgtctgtcatctctttgaacaaaaaataaggcgggagcatttcccgcctgtggtaaacgtgatggaacggctgtaattagccagccatctgtttttcgcgaatttcagccagcgttttgcagtcgatgcacagatcggctgtcgggcgcgcttccagacggcgaataccaatttcaacaccgcaggattcgcagtagccgaaatcttcgtcttccacttttttcagcgtcttctcgatctttttgatcagcttacgctcgcgatcgcggttacgcagttcgaggctgaactcttcttcctgggctgcacggtctaccgggtccgggaagttggctgcttcatcctgcatatgtgtaacggtgcgatcgacttcatccctgagttgattacgccatgcttccagaatacgacggaagtgcgccagctgggcttcattcatatactcttcgcccggcttctcctgatatggttccaccccagcgatggcgagaatactcagggagcttgttttacggttttgcccttcttgcatgttgcttctccttaacacgcactatcgatccccatgttcgggggaaaaatgaggccgctataaatagcagatgcttttccggatagcaattatctaaacgtaacacttgacaactgtgtgaggaaaagcgtatttgcgcacgcgaccagaatgtaaattaaccagttacttactttattacaatgtaaccggcagactttttttaagagccatgccttcagcagaaatttccgctttgtaagccagaatttctacccccctctgttgagcttcactcaatagttgcgcgtatttctcatcgatgtggcgcgcgggactaaaccgtgtaatggcactatgcagcacggcgaaaaagataaccgcacgctggccttcagccgctacgctcatcaactcccgaaggtgtttctgacctcgttcagtgaccgcatcgggaaaatatccctgttcgttctccgctaacgtaacgcttttcacttcaatatagcagtctggacggctatccgcctgcaacataaagtcaatacggctgcgttctgcgccgtattttacttcgcttttcaggctgctatagccactcagttcactaatactttcattaaggatagcctctttcgtcaacctgttagcccaaagcgtgttgacgcaaataaatgcgccgctctggctttgagttaattcccaggtgtgtgggtatttccgtttggtgttgtcactagtgctataccagacggtatcgccaggcgttgcacaaccggtcatcgcacccgtattcgggcagtgtagcgttaattcgcgaccatcgggtgtgatcacatcggctaaaaaacgtttgtaacgctgaattagcgtcgcgcgctgtagagggggagaaaattccattgcgacaatccttgttattgcgttagcgcccagcgttttagcggcgtgtagcgtgtgcgtccacgggcaaagctggaggcgtaaagggtgaactccgtcaccgcatagctccagttaaaacctggcggcgggattgtcaccgcctcgctggcgtcgcgcaataaggtaatatgtggatgaaacggacgattgctttgaaaacaaccgctgcgggcagcctgactacggagcatattcgccagctggattaagccgcgtggcggctgacgcatccctaaccacaccacacggctacgcagccattgtccggcgtcatcaagcgtgagtgtgaaaccaggttgacgaatccgtccggctaaaagagaaagcgccttctctttctcggcgctcacttcgcctaaaaatgccagagtcagatgcaaattatcggcggcgaccggacgtcccgcctcaggtgggaagtgtgtggcgcgccaatggataatctgttcgcggatttctgcaggtaagtcgatagcaaagaacagacgttgcggttcagacatgtgaggcactcggttatgaattaccgcgatgctacaatgtggcgcgaagaatgttaaccctctggagcgttttgtgagcagcttgcccgttgctgccgtcttacctgaattacttaccgctctcgattgtgcgccgcaggtattattaagtgcgccgaccggggccgggaaaagtacctggctgccgctgcaactgctggcgcatcccggcattaacgggaaaattatcctgctggagccgcgtcgtctggcggcgcgtaacgtcgcgcaacggctggcggagctgcttaacgaaaagccaggcgataccgttggctaccggatgcgtgcgcaaaactgcgtcgggccgaatacccgcctggaagtggttaccgaaggcgtgctgacgcgcatgatccagcgtgacccggaactgagcggtgttggactggtgatccttgatgaatttcatgagcgcagcttgcaggcggatttggcgttggcgctgttactcgatgtgcaacaaggtctgcgtgatgaccttaaactgctgattatgagcgctaccctggacaacgaccgcttgcagcaaatgctgccagaagcgcctgtcgtcatcagtgaagggcgcagctttccggttgaacgccgttatttaccgctgcccgcgcatcagcgttttgacgatgccgttgcggtagccaccgctgaaatgctgcgtcaggaaagcggaagtttactgttatttttacctggcgtcggagaaattcagcgtgtgcaggaacaactggctagccgcatcggcagtgatgtattgctctgcccgctgtatggcgcgttgagcctgaacgatcagcgaaaagcgatcctcccggcaccgcaagggatgcgcaaagtggtgctggcgaccaatattgctgaaaccagtttaaccattgaaggtattcgtctggtggtggattgtgcccaggagcgtgtggcgcgttttgatccgcgcacggggcttacgcgactgattactcaacgcgttagccaggcatccatgacgcagcgtgccgggcgcgccgggcgtctggagccgggtatcagcctgcatttaatcgccaaagaacaagcagaacgcgccgcggcgcaaagtgaaccggagatcttacaaagcgatctttccggtttgctgatggaattactgcaatggggatgcagcgatccggcgcagatgagctggctggatcaaccgccagtagtgaatctactggccgcgaaacgtctgttacaaatgctgggggcactggagggtgaacggcttagtgcgcaagggcaaaaaatggcagcgctgggtaacgatccgcgtttagcggcaatgctggttagcgcgaagaacgacgacgaagctgctaccgcggcaaaaattgccgccattctcgaagagccgccacggatgggcaatagtgacctgggcgtggcgtttagccgcaatcaaccagcctggcagcaacgtagtcagcaactgttaaaacgcttaaacgtacgtggcggtgaggcagacagtagccttatcgcgccgctacttgccggggcgtttgccgatcgcattgctcgtcgccgtgggcaagatggacgctatcaactggcaaacggcatgggagcgatgctcgatgccaacgacgcgctaagccgccacgaatggttgatcgcaccgttattattgcagggcagcgccagcccggatgcgcggattttactggcgctgctggtcgatattgatgagttagtacaacgctgcccgcagctggtacagcagtctgacactgtggagtgggatgacgcgcaaggtacgctgaaagcctggcgtcggctacaaatcggtcagttgacggtgaaagtgcagccgctggcgaaaccgagtgaagacgagttgcatcaggcgatgcttaatggcatccgtgataaaggtttaagcgtgctcaactggacggcggaagcggaacagctacgcttgcgtttgttatgcgccgcaaagtggttgccggaatatgactggccagcggttgatgatgaaagtttattggcagcgctggaaacgtggctgctgccacatatgactggcgtacatagtctacgcggcctgaaaagtctcgacatttatcaggcactacgcggattacttgattggggaatgcagcaacgtctggatagtgaattgcctgcgcattacactgtgccgacgggaagccggatcgccattcgttatcatgaagataacccgcccgcgctggcggtgagaatgcaagagatgtttggcgaggccaccaatccgacgatcgcccaggggcgcgtgccgctggtgctggagttgcttagtcctgcccaaaggccattacaaatcacacgagatttgagcgacttctggaaaggagcgtaccgtgaggtgcaaaaagagatgaaagggcgttatcccaaacatgtctggccggacgacccggcaaatactgcaccgacgcgacggacgaaaaagtatagctaaggttggttttctccctctccctgtgggagagggccggggtgagggcatcagcgcgcacgttcaccctcaccctaaccctctccctcaagggagaggggaccgatcgagcacaaattttgagagatatcttcttctgtcttgtaacagaagaacagaaaatcgggcttttgcgcctgaatattgcggagaaaaagcatggccgggaatgaccgcgagccaattggacgcaaagggaaaccgacgcgtccggtcaaacaaaaggtaagccgtcgtcgttacgaagatgacgatgattacgacgattatgatgactatgaggatgaagaaccgatgccgcgcaaaggtaagggcaaaggcaaagggcgtaagcctcgtggcaaacgcggctggctatggctactgctaaaactggctatcgtttttgccgtgctgatcgccatttacggcgtttatctcgatcaaaaaattcgtagccgtattgatggcaaggtctggcaactgcctgcggcagtttatggccgaatggtcaatcttgagccagacatgaccatcagcaagaacgagatggtgaagctgctggaggcgacccagtatcgtcaggtgagcaaaatgacccgtcctggcgaatttaccgtgcaggccaacagcattgagatgattcgccgtccgtttgatttcccggacagtaaagaaggacaggtgcgcgcgcgtctgacctttgatggcgatcatctggcgacgatcgtcaatatggagaacaaccgtcagttcggtttcttccgtcttgatccgcgtctgatcaccatgatctctagcccaaacggtgagcagcgtctgtttgtgccgcgcagtggtttcccggatttgctggtggatactttgctggcgacagaagaccgtcatttttacgagcatgatggaatcagtctctacagtatcggacgtgcggtgctggcaaacctgaccgccggacgcacggtacagggtgcgagtacgctgacgcaacagctggtgaaaaacctgttcctctccagcgagcgttcttactggcgtaaagcgaacgaagcttacatggcgctgatcatggacgcgcgttacagcaaagaccgtattcttgagctgtatatgaacgaggtgtatctcggtcagagcggcgacaacgaaatccgcggcttcccgctggcaagcttgtattactttggtcgcccggtagaagagctaagcctcgaccagcaggcgctgttagtcggtatggtgaaaggggcgtccatctacaacccgtggcgtaacccaaaactggcgctggagcgacgtaatctggtgctgcgtctgctgcaacagcaacagattattgatcaagaactctatgacatgttgagtgcccgtccgctgggggttcagccgcgcggtggggtgatctctcctcagccagcctttatgcaactggtgcgtcaggagctgcaggcaaaactgggcgataaggtaaaagatctctccggcgtgaagatcttcactacctttgacagcgtggcccaggacgcggcagaaaaagccgccgtggaaggcattccggcactgaagaaacagcgtaagttgagcgatcttgaaactgcgattgtggtcgtcgaccgctttagtggtgaagttcgtgcgatggtcggaggttctgagccgcagtttgcgggctacaaccgtgcgatgcaggcgcgtcgtagcattggttcccttgcaaaaccagcgacttatctgacggccttaagccagccgaaaatctatcgtctgaatacgtggattgcggatgcgccaattgcgctgcgtcagccgaatggccaggtctggagtccgcagaatgatgaccgtcgttatagcgaaagcggcagagtgatgctggtggatgcgttgacccgtagcatgaacgtgccgacggtaaatctggggatggcgctggggctgcctgcggttacggagacctggattaaactgggcgtaccgaaagatcagttgcatccggttccggcaatgctgctgggggcgttgaacttaacgccaatcgaagtggcgcaggcattccagaccatcgccagcggtggtaaccgtgcaccgctttctgcgctgcgtagcgtaatcgcggaagatggcaaagtgctgtatcagagcttcccgcaggcggaacgcgctgttccggcgcaggcggcgtatctgacactatggaccatgcagcaggtggtacaacgcggtacgggtcgtcagcttggggcgaaatacccgaacctgcatctggcagggaaaacagggactaccaacaataacgtagatacctggtttgcgggcattgacggcagcacggtgaccatcacctgggtcggccgtgataacaaccagccgaccaaactgtatggtgccagcggggcaatgagcatttatcagcgttatctggctaaccagacgccaacgccgctgaatcttgttccgccagaagatattgcagatatgggcgtggactacgacggcaactttgtttgcagcggtggcatgcgtatcttgccggtctggaccagcgatccgcaaagcctgtgccagcagagcgagatgcagcagcagccgagtggcaatccgtttgatcagtcttctcagccgcagcaacagccgcaacagcaacctgctcagcaagagcagaaagacagcgacggtgtagccggttggatcaaggatatgtttggtagtaattaacatctaagcgtgaaataccggatggcgagttgccatccggtaaaataacatcccatctaagatattaaccctttcttttcatctggttgtttattaacccttcaggaacgctcagattgcgtaccgcttgcctgtaagactcaatgtaagccgtgccaaaatatgatggctaggacgagctagaacccgccagcgtttcgaatattatcttatctttataataatcattctcgtttacgttatcattcactttacatcagagatataccattccatataacggccctgtacgcctggacggataaagcgtttacgcgacaacggatgcccgatgcgacgctggcgcgtcttatcgggcctacaaacggccccgaatcgtaggtcggataaggcgttcacgccgcatccgacaaaccatgctggatcacaacttcgcaaacacccgacgtgcagcatcgatggtgttattgatatcttccatgctgtgcgccacggacataaagcccgcttcaaacgcactcggtgccaggtaaacaccttcgtccagcatcatatggaagaaacgcttaaagcgttccacgtcacaggccatcacatcctgatagcacgtcacggactcggcgtcggtaaagaaaataccgaacatgccgccaacgtggttaacgaccagcggaattccggcttcttctgccgcttccagcagaccttctgccagacgtgttgtcagctcatccagcgtttcgtgaacgcccggctgcgcgacttcattcagacaggcgaaacccgctgccatcgcaatcgggttaccggaaagcgtacccgcctgatagaccggacccgtcggggccagcgcatccattacatcacgacgaccaccgaatgcgcctaccggcattccaccgccgatgattttgccgaggcaggttaaatctggcactacgccgtaataatcctgtgcgccagctagcgctacgcggaaaccggtcatcacttcatcgatgatcagcaacgcgccaaattcgtcgcacagcgcgcgcagacctggcaggaactctggcagcggcggaacacagttcatattgcctgccaccggctcgacgataatacaggcaatctcttgcgggtattgctcaaatgcggcgcgtacagaagccagatcattataagtacaggttaaggtatatttggcgaaatctgccggaacgcccgggctgtttggctggcctaacgtgagtgcgccagaaccggctttcaccagcaggcagtcagcgtgaccatggtaacacccttcaaatttaataattttgtcgcgaccggtaaaaccacgggccaggcggatggcgctcatggtcgcttcagtgccggagttcaccatgcgcaccatatccatggtcgggaccagttcggtcaccagttgcgccattttcacttccatttcggttggtgcaccaaagcttaaaccacgctcggcggcttcaatcacggcattgcggattgccggatggttatggcccagcaccatcggcccccaggaaccgacataatcgatataggctttgccatcaacatcgtacagataagcgccgtccgctttttcgataaacagtggagtgccgcccacgccagtaaaggcgcgaacaggggagttcacaccgccagggatcagctcgcgcgctgcgctgtaaagattttcagacttactcatggagggttcctgattcgtagaaaaagtgaatggctgctattctatgttattcataacaagttaaatactcgtcaaacatcaggctgcttgtactggtgcaatcctgatttcttagagtataaaagttttgtgcatttgaaacattacgctttgcaaaggattttcatggaacgtgcgagtaaaatgccgtcatcttatttgtatgaccaataagtgatcattggatgaaaactgatactccctctttagaaacaccgcaggccgcgcgcctgcgacgcagacaactgattcgccaacttcttgagcgcgataaaaccccgttagccattttgtttatggcggcagtcgtcggcacgcttgttgggctggcagcggttgcttttgacaaaggtgtcgcctggttgcagaaccaacgtatgggggcgctggtacatactgctgataattatccgcttctgttaaccgtcgcttttctctgtagcgcggtgctggcgatgtttggctactttttggtgcgcaaatacgcgccggaagcaggtggtagcgggatcccggaaattgaaggggcgctggaagatcaacgtcccgttcgctggtggcgtgtattgccggtgaagttctttggcgggctggggacactcggcggaggcatggtgttggggcgcgaagggccaaccgtgcagatcggcggtaacattggccgtatggtgcttgatattttccgcctgaaaggtgacgaagctcgccatacgctgctggcaaccggtgctgctgcggggctggctgcggcctttaacgcgccgctggcgggtattttgtttattatcgaagagatgcgtccgcagtttcgctatacgttaattagcattaaagcggtatttattggtgtcattatgagcaccattatgtaccggatttttaatcatgaagttgcgttgattgacgtcggtaaactttctgatgcgccgcttaatacgctgtggctttatctgatcctcggtattatttttggcattttcggccctatttttaataaatgggtgctggggatgcaggatttgctgcaccgtgtgcacggcggcaatattaccaaatgggtgctaatgggcggtgcgattggcggtctgtgtggattgctggggtttgtggcaccagcaacgagcggcggcggttttaacctgattcctatcgctaccgcggggaatttcagcatgggaatgctggtgtttatcttcgtcgcgcgggtcattaccaccttactctgcttctcttccggcgcgccgggcggtatttttgccccgatgctggcgctgggtactgtgctgggaaccgctttcggaatggttgccgttgagctgtttccgcaatatcaccttgaggcggggacgtttgctattgccggaatgggggcattactggcggcatctattcgcgcgccgttaacggggatcattctggttctggagatgaccgataactaccagctcattttgccaatgattattaccggtcttggcgcaacactattagcgcaatttaccggcgggaaaccgctatacagcgcgattcttgcgcgcacgctggcaaaacaggaagctgagcaactggcgcgaagcaaggccgcaagtgccagcgagaatacttgaacgaaataccagggtattagataatggcgattattattgggttagaatttgcccaattgccgatgtcgtttggagcaaaatatgagtgatgacgtagcactgccgctggagtttaccgacgcagcagccaacaaagttaaaagcctgatcgctgacgaagataacccgaatctgaaattacgcgtgtatatcaccggtggcggttgcagcggcttccagtatggtttcacctttgatgatcaggtgaacgaaggcgatatgaccatcgaaaaacagggcgttggcctggtggttgatccgatgagcctgcaatatctggtcggcggttccgttgattataccgaaggtctggaaggttctcgtttcatcgtgaccaacccgaacgcgaaaagcacctgcggttgcggttcttcctttagtatctaatctgttgttcatgtgccggataaactatccggcacatcttctctcttcaacgcccattctcatccagcgcaaacgtcggtagcttaagatgccaacgaatagccgccagccgaatcaatagcgtcacgaccatgcccatcatactggctgtttccagtggtacggaaaatgtgtaataagccgtagcgtggacaataccgccgataatacaggcagttgcgtagatttctgtacgtaaaatcatggggatttcgcgggccagaacatcacgaatgatcccgccgccaacgccagtaatgacgcccatacaaaccgcgattaacggaccggcttccgcattaaaggctttattcacgccaatgccgacaaacaccgccagaccaacggcgtccagcaccggcaacatccattttggtaagcgtcttggctggcgcaccagcacgatggtcagcatgctggtgaccattgcaacgaccagatcggtgggatctttcacccaaaataccgggccgtgatccagcgccatgtcgcgaattgtcccgccgcctactgcggttaccacgcccagtaccagaacaccaaaagggtccatacgcaattttccggctaacaaaacgccggagatggcaaataccgctgtgccgactatatccagccaatagacgagcattgttcaatccccactgagcacctgaaaaggtcaggcgttaatctacctgactaagcgcattacagagctgttgtgcagcgaggataatacgtgggcttgcacgttcaaaccagtcactcgtgagaggaataacgggaattttgagctgttcaccccagtattgtttgattttaggaatttggtccggtccgcctgtaatgacaatcgcctgtgggctgcgtgctaacacctgttcgcggctaacttgcggccagggaacccggctgtctttaaagatgttttctccgccacaaacttcgagtacctggttctgaatgctctcttttccactggtaaatggcggattaatgccgaattgcagaaaaacacgttttttaggtttatcagcatattgcgctttcaattgcgcgtactgatccagcagggattgcgcggcttgttcggccttgtctggttgcggactccagggggccagttgacgtaacgcattggcaatttgttcaatgcttgtcgcatcgacccacatcacttttattcccaggctagccagctggtcaacctgccgctcggcattacctccacgccaggcaatcaccagatcgggtttcagcgcgacaatgcgttccagattcatcccctgccaggtggaaacctgctcaatcttttgcgcttgtggaggatagtcggaatagctgctgaccccaaccggcgtgatcccggcggcaaaggcaagttcagtgttggcgggagaaagcgtgatgacgcgcggcgcggcgttgagccacagtggcgcaagaaaagacagggcgaccagcgccctgaacagactcttagccatgtgcaagtttctgcaccagactctcaaccatcaggctggactgtttagcggcaacagccaggaactcatcgaagctaagatgagactgttgatcggccacgtcggagatggcgcgtacgacaacaaacgggacgttgaaattgtggcagacatgggcgattgccgtcgcttccatctctacagcaatggcctgtgggaagttgtggcggattttcgccagaccaacagaaccgttgatgaaagcgtcgccgctaacaatcaggccacgtacagcgttaagattcagttcggcaatgcaggcctcagcggcagcgatcagtttatcgtcagctttaaagcctgccggacagcctggtaactgaccgtattcataaccaaatgccgtgacatccgcgtcgtgataacgtgcttcgtcgctgacaacgatatcgcccactttcaacgttggtgccaggccaccggcagaaccggtgttaataatcacatctggcttgcagtgttccaacagcaaagtggcacccagcgccgcagcgactttaccgatgccgcttttcagaagcgcaacctcggttccattcagttggccggtatagatttcgcaaccgccgagactgatagtttgacggttttcgattttgtcacgcagcagcgtaacttcttcttccattgcaccaatgatgccgattttcatagatttactcgcgataagcccgatttgaaggcatagtttaccatgcgcttacggggaagcgtatttctcacgcgggagaggacatggcacagattgatttccgaaaaaaaataaactggcatcgtcgttaccgtagtccgcagggcgttaaaaccgaacatgagatcctgcggatcttcgagagcgatcgcgggcgtatcatcaactctccggcaattcgtcgtctgcaacaaaagacccaggtttttccactggagcgcaatgccgccgtgcgcacgcgtcttacccacagcatggaagtccagcaggtggggcgctacatcgccaaagaaattttaagccgtctgaaagagcttaaattactggaagcatacggcctggatgaactgaccggtccctttgaaagcattgttgagatgagttgcctgatgcacgatatcggcaatccgccgtttggtcattttggcgaagcggcgataaatgactggtttcgccaacgtttgcacccggaagatgccgaaagccagcctctgactgacgatcgctgcagcgtggcggcactacgtttacgggacggggaagaaccgcttaacgagctgcggcgcaagattcgtcaggacttatgtcattttgaggggaatgcacaaggcattcgcctggtgcatacattgatgcggatgaatctcacctgggcacaggttggcggtattttaaaatatacccgtccggcgtggtggcgtggcgaaacgcctgagacacatcactatttaatgaaaaagccgggttattatctttctgaagaagcctatattgcccggttgcgtaaagaacttaatttggcgctttacagtcgttttccattaacgtggattatggaagctgccgacgacatctcctattgtgtggcagaccttgaagatgcggtagagaaaagaatatttaccgttgagcagctttatcatcatttgcacgaagcgtggggccagcatgagaaaggtagcctctttagcctggtggttgaaaatgcctgggaaaaaagtcgcagtaatagtttaagccgcagtacggaagatcagttttttatgtatttacgggtaaacaccctaaataaactggtaccctacgcggcacaacgatttattgataatctgcctgcgattttcgccggaacgtttaatcatgcattattggaagatgccagcgaatgcagcgatcttcttaagctatataaaaatgtcgctgtaaaacatgtgtttagccatccagatgtcgagcggcttgaattgcagggctatcgggtcattagcggattattagagatttatcgtcctttattaagcctgagcttaagtgactttactgaactggtagaaaaagaacgggtgaaacgtttccctattgaaagccgcttattccacaaactcagcacgcgccatcggctggcctatgtcgaggctgtcagtaaattaccgagtgattctcctgagtttccgctatgggaatattattaccgttgccgcctgctgcaggattatatcagcggtatgaccgacctctatgcgtgggatgaataccgacgtctgatggccgtagaacaataaccaggcttttgtaaagacgaacaataaatttttaccttttgcagaaactttagttcggaacttcaggctataaaacgaatctgaagaacacagcaattttgcgttatctgttaatcgagactgaaatacatgaaaaaaaccacattagcactgagtgcactggctctgagtttaggtttggcgttatctccgctctctgcaacggcggctgagacttctagtgcaacgacagcccagcagatgccaagccttgcaccgatgctcgaaaaggtgatgcctagtgtggtcagcattaacgtagaaggtagcacaaccgttaatacgccgcgtatgccgcgtaatttccagcagttcttcggtgatgattctccgttctgccaggaaggttctccgttccagagctctccgttctgccagggtggccagggcggtaatggtggcggccagcaacagaaattcatggcgctgggttccggcgtcatcattgatgccgataaaggctatgtcgtcaccaacaaccacgttgttgataacgcgacggtcattaaagttcaactgagcgatggccgtaagttcgacgcgaagatggttggcaaagatccgcgctctgatatcgcgctgatccaaatccagaacccgaaaaacctgaccgcaattaagatggcggattctgatgcactgcgcgtgggtgattacaccgtagcgattggtaacccgtttggtctgggcgagacggtaacttccgggattgtctctgcgctggggcgtagcggcctgaatgccgaaaactacgaaaacttcatccagaccgatgcagcgatcaaccgtggtaactccggtggtgcgctggttaacctgaacggcgaactgatcggtatcaacaccgcgatcctcgcaccggacggcggcaacatcggtatcggttttgctatcccgagtaacatggtgaaaaacctgaccagccagatggtggaatacggccaggtgaaacgcggtgagctgggtattatggggactgagctgaactccgaactggcgaaagcgatgaaagttgacgcccagcgcggtgctttcgtaagccaggttctgcctaattcctccgctgcaaaagcgggcattaaagcgggtgatgtgatcaccagtctgaacggtaagccgatcagcagctttgccgcactgcgtgctcaggtgggtactatgccggtaggcagcaaactgaccctgggcttactgcgcgacggtaagcaggttaacgtgaacctggaactgcagcagagcagccagaatcaggttgattccagctccatcttcaacggcattgaaggcgctgagatgagcaacaaaggcaaagatcagggcgtggtagtgaacaacgtgaaaacgggcactccggctgcgcagatcggcctgaagaaaggtgatgtgattattggcgcgaaccagcaggcagtgaaaaacatcgctgaactgcgtaaagttctcgacagcaaaccgtctgtgctggcactcaacattcagcgcggcgacagcaccatctacctgttaatgcagtaatctccctcaaccccttcctgaaaacgggaaggggttctccttacaatctgtgaacttcaccacaactccatacatcttcatcatcctttaggcatttgcacaatgccgtacgttacgtacttccttatgctaagccgtgcataacggaggacttatggctggctggcatcttgataccaaaatggcgcaggatatcgtggcacgtaccatgcgcatcatcgataccaatatcaacgtaatggatgcccgtgggcgaattatcggcagcggcgatcgtgagcgtattggtgaattgcacgaaggtgcattgctggtacttagtcagggacgagtcgtcgatatcgatgacgcggtagcacgtcatctgcacggtgtgcggcaggggattaatctaccgttacggctggaaggtgaaattgtcggcgtaattggcctgacaggtgaaccagagaatctgcgtaaatatggcgaactggtctgcatgacggctgaaatgatgctggaacagagccggttgatgcacttgttggcgcaggatagccgtttgcgggaagaactggtgatgaacctgattcaggcagaggagaatactcccgcacttactgaatgggcgcaacggctggggatcgatctcaatcaaccgcgagtggtggctattgttgaggtcgacagcggtcagcttggcgtggacagcgcaatggcggagttacaacaactgcaaaacgcgctgactacgcccgagcgtaataatctggtggcgattgtcagcctaaccgaaatggtggtgttgaaaccggcgttgaactcttttgggcgctgggatgcagaagatcatcgtaagcgagttgaacaactgattacccgcatgaaagagtacggccagctgcgttttcgcgttagtctgggcaactattttaccggtcctggcagtattgcccgatcctatcgtacggcgaaaacgacgatggtggtgggtaaacagcggatgccagaaagtcgctgctatttttatcaggatctgatgttacctgtgttactcgacagtttgcgtggcgactggcaggccaacgaactggcgcgaccgctggcgcggctgaaaacgatggacaataacggcttgctgcgacgaacgctggcggcgtggtttcgccacaatgtgcaaccgctggcaacgagtaaggcgttgtttattcatcgtaataccctggagtatcggcttaatcgtataagcgaactgaccgggcttgatttgggcaattttgatgacaggttgctgctgtatgtggcgttacaactggatgaagagcggtaagttatgcgttaaggttgaggcggcgctggctcattcccctcagcccgaagggtagaggggaatgcccgaattaaccgtcagttcgggattatttacgcgttagtttttccagatcggcttcaatctcgctgatcttattggttacgacactctccaggtgacgtaagtcgtcgaggatcttacgcttaagatcaacttcgctgcggtcacgctggcagatttgatcaagctcatcaatgatataccgtagattcgggctgatttcctggacttctttataaccctgacccacaccatcagcgacgaccgttttacgctgacgcggatatttaaacttaacgctcttggcgaaaaactcgcctttgtctttctggaaatagattttcagaatatcgttgttggcttcctgccggaggctgtaacgatcaatttcttcaggattggtaatacccagacttttcagattgtcgtacatagcgttacctcaaaatgagtcagtaaattgtgcttattttagcatttggcctggcccgcccggctcgactgtgatcgcagaaagcctttttcttccagacttctatcatggcgtaaaaatcaaaaaattacctgctttattctggtgataaaattcacgatttacaccagttccagcatcgttacttccgggcggcagttcagacgcaaaccatacaaactgcccacgccacgggttgtgtagatgtgtctttcgccaaaggcatttaatccggcgacgtaacgtttatcttcgacaggggcaaaaggttcaccaaccaacggtacgcgcagttgcccgccgtgagtatggccgcacagcatcagatcccagggttcatcacgcatgacttctttgctgtcgggattatgcgccagcaccagtcttggcagattggcttcgctggcgggaggcggtttgcattgtccggcccataagtcaccagtgcctaccagttcgaattgcctgttcggcgtggcgatcaccgtagcctggttaaacaacaccgtgatgcccgcacttttcaacgtctcgccaattaagtgatttttttctgtaccaacagggcgatcgtggttgccgaagcaggcaaacgtcggcgcacattcggcaaggggggagagtacgtcactaaacgcgctaaaattcaggctcatatcaaataatacgtaatcgccgcccagtaatatcaaatcgggcttttgttctatgccaagagcaatcgcgtcagaaatcaggcttaaaggaacaaaacgagagtaatggagatcggccagaaaaagaattttgaatggtgctgcgttgtctttaaaaaaggcgaggcggtgacggattaattcaaaccagcctggctcacagtaatgcatataaccgaaaccactgctcgtggctatcgtcgcggcagtagcctgcaaaaatcggcggcgactaatcatcgctcatccctgcaaaaaaatcgggcagcgtcgtgctgcccgtgtgcatacttttagtcgatggtacgcagcagttcgttaatgccgactttgccgcgagttttcgcgtcaactttcttaacgataaccgcacagtagaggctgtatttgccatctttactcggcagattaccactaacaaccacagaccccgccggaacgcgaccgtagtggatttcgccggtttcacggtcgtaaatacgggtgctctgaccaatgtatacgcccatggaaatgacggaaccttcttcgacaatcaccccttcaaccacttcagagcgcgcgccgatgaagcaattatcttcaatgatggttgggttagcctgcagcggttccagcacgccgccgatgcccacgccaccggaaaggtggacgtttttaccaatctgcgcacaagaaccgacggtcgcccaggtatcaaccatggtgccttcatcaacatatgcgccgatgttgacgtaagacggcatcagcacggtgttacgggcaataaacgcaccctgacgtaccgccgctggtggcacaacgcggaagccttctttctggaaacgtgcttcgtcgtagtcggcgaatttcatcggcactttgtcgaagtagcggctttctgccccttcgatcacctgattatcattaatacggaaagagagcagcaccgcttttttcaaccactgatgcgtcacccactgaccgtcaattttttccgctacacgcagtgcgccggaatccagcagggcgatcacctgatttaccgcttcgcgggtaacggtgtctgcattggctggcgtgatctcggcacggcgttcaaaagcggtttcaataatgttctgtaactgctgcattgttaaactcttttcatatcagtaaacacatcaccctttatcgtttggattgagggcctctgtcaaccgctgatgcacttcctgctgcaactcgttattaagcgcacgccggtcagcggtggcaattatgaataaatcttctactcgctcgccaatggttgtaattcgggcaccatgaaggctaattcccagatcggcaaaaattttcccgactcgcgccagcagtccaggttggtcgagggcgatcagttcgaggaagcttttgcggtcggtatgggtcggcaaaaacgttacttcggtttcaacagtaaaatggcgtaatttggcgggttggcgacggggctgcggtggctgccagctactttgcgtcagtacttgctccagaccaaaccgaataacctcatgacgatctgcggacagcgggttgccatcgggttccagcacgataaaggtatccatcgccataccgtcgcgagtggtgaaaatttgtgcgtcgtgaacacttaaattgcggcggtctaattcggcacagacggcggcaaacagataagggcggtccgggctccagataaaaatctcggtgcctccacgcgtagcctgcgggctaagcaataccagcggtttgcttaaatcatgctgtaataaatggcgggcatgccaggccagttgatttgggctatggcggacaaaatagttagcacgacagcgactccaaatttggtgcagcgcctcttcgtcgatgttatccatgcgcagtagtgccagtgcctggagttggtgatggcgaacccgttcgcgcatatccggcgtgttttgcattccgcgtcgtagctgcttttcggtggcaaagtagagctcacgcaacagactttgcttccagctattccacagcgtttcgttggtggcgcaaatgtcagccacagtcaggcataccagatagcgcagacgattttccgtttgcacttcttcggcaaactgcttgatgacttccgggtcctgaatatcgcggcgttgggcggtcacgctcatcaacaggtgctggcgaaccagccaggcgaccagctgtgtttcgcgactgttcagcccgtggagttcggcaaaatgcactacatcctgagcaccgagaatggagtggtcgccgccgcgtcctttggcgatatcgtgaaacagcgcggcgatgaaaatcagctcagtactcggcaggcgcggccagacgtccacacacaacggatggcgctggcgcgtttcttcactggcaaaactctccagtttcagcatcacgcggatagtatgttcatccaccgtgtaggcgtggaacagatcaaactgcatctgcccgacgatatggctccattgcggcatatacgcgccgagcacgctatggcgatgcattggcaatagcccgcgccgcaccgctccggggtgacgcagaatgctcaaaaacagttttcgtgcttccggaatattacacagcggttgttgcagatggcgacgggcatggcgtaactggcgcagcgtggtggagtaaatgccggtgatcgcactgttgtgcaccatggtgtagaacatacgcaagatggcttccggctggcgcataaatagtgtttcatcacgcaggtcgattagcgtaccgcgtagctgaaactcatcgtcgattggacgtggtttttcgtcggcgggaagggcgaggatggcttcatcgaacagttgcagcagcatctggttgagttcactgacgcggcgtgtaacgcggaagtaatccttcatcatccgctcgaccggttcgttaccttcaccactgtaattcagacgctgggcgacgctaagctggcgatcgaataacaggcgattatcgtaacggctgacgaccagatgcagggcaaagcgaatacgccacaatatatgcagacattcgtttaattccgcccgctccgcactggttaagaagccaaacccgaccatttcatccaggcttgttgcgccaaaatgacggcgggccacccattgcagagtgtggatatcgcgcaagccgccagggctgcttttgatgtctggttcaaggttgtagctggtgccatggtaacgctgatggcgctggttctgttcttcaactttcgccgcgtagaacttgtcggaaggccagaatccttcgctgaaaatatgtttttgcagttcgaggaacagcgcaacatcgccaattaataagcgggattcgattaaattggtggcgacggttaaatcgcttaacccttccagcatgcactcttcaagcgtgcgcacgctatgaccgacttccagctttacatcccagagcagcgttaacagctcgcccactttttgcgcctgatcgtccgggagctttttacggcttaaaatcagtaaatcgacgtcactaagtggatgcagctcgccacgaccgtagccaccgacggcgaccaatgccaggtcggcaatctggctgaatcccgcttcaatccataatcgttgcaggagctggtcgataaactcggtgcgcgcctcaatcaactgttctgcagagatcccattgtcaaaggcatcacccagccaacgctggaaagtatcgatatgggcttttatcccaccgacggttaattcatcacggggccagacgcatggattttgcggttgaccgggcagggtggggagagcggtgtttgcgtactgttctggaagggtattcattgtgcgccacccataagattaaattatcgcattaaaaaagccggcattcgccggcttcatcttattcgtcgtggctgattatcgccgggatggtgtcatccttgcgtagcgtcagaatttcgcagccgttatcagtcaccacaatagtatgctcatattgtgcagacaagctgcgatctttggtttttaccgtccagccatctttcatggtgcggatctcttttttacccgcgttgaccattggctcgatggtgaacgtcatcccaggtttcagtacgacgttggtttcacgggagtcatagtgcagcacctgcggttcttcatggaagccgcgaccaataccgtgtccgcaatattcacgaacgacggagaagccttctgcttcgacaaatttctgaatcgccgcaccgatttcgcgcagattaatgcctggttttaccatgcgtagcgccaggtacaggctttcttgcgtgatgcggcacagacgttcgcccatgatggtcggcttaccgacgataaacattttgctggtatcgccgtggaaaccatctttgattacggtgacatcaatgttaacgatatcgccatctttcagcagcttagcatcgtccgggataccgtggcacaccacttcattaatagagatgcaaacggatttcggatagccgtgatagccgaggcaggcagaaaccgcgtgttgttcattaacaatgtaatcattacagatgcgatccagctcgccggtgctgacgcccggtttaacatacggttcgatcatctccagcacttcggcagccagtcggccagcgacgcgcattttttcgatatcttctggggtcttgatagagatagccattaattctgtccatcagcgtcggtgataccgacaatatatatgtaagtgccgtcaatggtatcacacccgggcaaattgagaatcattctgaatttcgccaaacgtgccactgaaggttttctataatagaaaattcgacgtctgatgctgtacacagcgccaacaattattggtgtccacgacgtatttgtggtataaagcgcgccggacttccgatccatttcgtatacacagactggacggaagcgacaatctcactttgtgtaacaacacacacgtatcggcacatattccggggtgccctttggggtcggtaatatgggatacgtggaggcataaccccaacttttatatagaggttttaatcatggcaactgtttccatgcgcgacatgctcaaggctggtgttcacttcggtcaccagacccgttactggaacccgaaaatgaagccgttcatcttcggtgcgcgtaacaaagttcacatcatcaaccttgagaaaactgtaccgatgttcaacgaagctctggctgaactgaacaagattgcttctcgcaaaggtaaaatccttttcgttggtactaaacgcgctgcaagcgaagcggtgaaagacgctgctctgagctgcgaccagttcttcgtgaaccatcgctggctgggcggtatgctgactaactggaaaaccgttcgtcagtccatcaaacgtctgaaagacctggaaactcagtctcaggacggtactttcgacaagctgaccaagaaagaagcgctgatgcgcactcgtgagctggagaaactggaaaacagcctgggcggtatcaaagacatgggcggtctgccggacgctctgtttgtaatcgatgctgaccacgaacacattgctatcaaagaagcaaacaacctgggtattccggtatttgctatcgttgataccaactctgatccggacggtgttgacttcgttatcccgggtaacgacgacgcaatccgtgctgtgaccctgtacctgggcgctgttgctgcaaccgtacgtgaaggccgttctcaggatctggcttcccaggcggaagaaagcttcgtagaagctgagtaataaggcttgataactcccccaaaatagttcgagttgcagaaaggcggcaagctcgagaattcccgggagcttacatcagtaagtgaccgggatgagcgagcgaagataacgcatctgcggcgcgaaatatgaagggggagagcccttatagaccaggtagtacacgtttggttagggggcctgcatatggccccctttttcacttttatatctgtgcggtttaatgccgggcagatcacatctccgaggattttagaatggctgaaattaccgcatccctggtaaaagagctgcgtgagcgtactggcgcaggcatgatggattgcaaaaaagcactgactgaagctaacggcgacatcgagctggcaatcgaaaacatgcgtaagtccggtgctattaaagcagcgaaaaaagcaggcaacgttgctgctgacggcgtgatcaaaaccaaaatcgacggcaactacggcatcattctggaagttaactgccagactgacttcgttgcaaaagacgctggtttccaggcgttcgcagacaaagttctggacgcagctgttgctggcaaaatcactgacgttgaagttctgaaagcacagttcgaagaagaacgtgttgcgctggtagcgaaaattggtgaaaacatcaacattcgccgcgttgctgcgctggaaggcgacgttctgggttcttatcagcacggtgcgcgtatcggcgttctggttgctgctaaaggcgctgacgaagagctggttaaacacatcgctatgcacgttgctgcaagcaagccagaattcatcaaaccggaagacgtatccgctgaagtggtagaaaaagaataccaggtacagctggatatcgcgatgcagtctggtaagccgaaagaaatcgcagagaaaatggttgaaggccgcatgaagaaattcaccggcgaagtttctctgaccggtcagccgttcgttatggaaccaagcaaaactgttggtcagctgctgaaagagcataacgctgaagtgactggcttcatccgcttcgaagtgggtgaaggcatcgagaaagttgagactgactttgcagcagaagttgctgcgatgtccaagcagtcttaattatcaaaaaggagccgcctgagggcggcttctttttgtgcccatcttgtaaattcagctaacccttgtggggctgcgctgaaaagcgacgtacaatgtcgctagtattaattcatttcaatcgttgacagtctcaggaaagaaacatggctaccaatgcaaaacccgtctataaacgcattctgcttaagttgagtggcgaagctctgcagggcactgaaggcttcggtattgatgcaagcatactggatcgtatggctcaggaaatcaaagaactggttgaactgggtattcaggttggtgtggtgattggtgggggtaacctgttccgtggcgctggtctggcgaaagcgggtatgaaccgcgttgtgggcgaccacatggggatgctggcgaccgtaatgaacggcctggcaatgcgtgatgcactgcaccgcgcctatgtgaacgctcgtctgatgtccgctattccattgaatggcgtgtgcgacagctacagctgggcagaagctatcagcctgttgcgcaacaaccgtgtggtgatcctctccgccggtacaggtaacccgttctttaccaccgacagtgcagcttgcctgcgtggtatcgaaattgaagccgatgtggtgctgaaagcaaccaaagttgacggcgtgtttaccgctgatccggcgaaagatccaaccgcaaccatgtacgagcaactgacttacagcgaagtgctggaaaaagagctgaaagtcatggacctggcggccttcacgctggctcgtgaccataaattaccgattcgtgttttcaatatgaacaaaccgggtgcgctgcgccgtgtggtaatgggtgaaaaagaagggactttaatcacggaataattcccgtgatggataaataagggtaagattccgcgtaagtatcgcgggggcgtaagtctggttataaggcgttattgttgcaggcagtttggtcacggccagcgcgcagcaaccggagcgtacaaaagtacgtgaggatggcgagcactgcccggggccaaaatggcaaataaaatagcctaataatccagacgattacccgtaatatgtttaatcagggctatacttagcacacttccactgtgtgtgactgtctggtctgactgagacaagttttcaaggattcgtaacgtgattagcgatatcagaaaagatgctgaagtacgcatggacaaatgcgtagaagcgttcaaaacccaaatcagcaaaatacgcacgggtcgtgcttctcccagcctgctggatggcattgtcgtggaatattacggcacgccgacgccgctgcgtcagctggcaagcgtaacggtagaagattcccgtacactgaaaatcaacgtgtttgatcgtagtatgtctccggccgttgaaaaagcgattatggcgtccgatcttggcctgaacccgaactctgcgggtagcgacatccgtgttccgctgccgccgctgacggaagaacgtcgtaaagatctgaccaaaatcgttcgtggtgaagcagaacaagcgcgtgttgcagtacgtaacgtgcgtcgtgacgcgaacgacaaagtgaaagcactgttgaaagataaagagatcagcgaagacgacgatcgccgttctcaggacgatgtacagaaactgactgatgctgcaatcaagaaaattgaagcggcgctggcagacaaagaagcagaactgatgcagttctgatttcttgaacgacaaaaacgccgctcagtagatccttgcggatcggctggcggcgttttgctttttattctgtctcaactctggatgtttcatgaagcaactcaccattctgggcagcaccggcagcattggttgcagcacgctggacgtggtgcgccataatcccgaacacttccgcgtagttgcgctggtggcaggcaaaaatgtcactcgcatggtagaacagtgcctggaattctctccccgctatgccgtaatggacgatgaagcgagtgcgaaacttcttaaaacgatgctacagcaacagggtagccgcaccgaagtcttaagtgggcaacaagccgcttgcgatatggcagcgcttgaggatgttgatcaggtgatggcagccattgttggcgctgctgggctgttacctacgcttgctgcgatccgcgcgggtaaaaccattttgctggccaataaagaaagtctggttacctgcggacgtctgtttatggacgccgtaaagcagagcaaagcgcaattgttaccggtcgatagcgaacataacgccatttttcagagtttaccgcaacctatccagcataatctgggatacgctgaccttgagcaaaatggcgtggtgtccattttacttaccgggtctggtggccctttccgtgagacgccattgcgcgatttggcaacaatgacgccggatcaagcctgccgtcatccgaactggagcatggggcgtaaaatttctgtcgatagcgctaccatgatgaacaaaggtctggaatacattgaagcgcgttggctgtttaacgccagcgccagccagatggaagtgctgattcacccgcagagtgtgattcacagtatggtgcgctatcaggacggcagtgttctggcgcagctgggggaaccggatatgcgtacgccaattgcccacaccatggcatggccgaatcgcgtgaactctggcgtgaagccgctcgatttttgcaaactaagtgcgttgacatttgccgcaccggattatgatcgttatccatgcctgaaactggcgatggaggcgttcgaacaaggccaggcagcgacgacagcattgaatgccgcaaacgaaatcaccgttgctgcttttcttgcgcaacaaatccgctttacggatatcgctgcgttgaatttatccgtactggaaaaaatggatatgcgcgaaccacaatgtgtggacgatgtgttatctgttgatgcgaacgcgcgtgaagtcgccagaaaagaggtgatgcgtctcgcaagctgaggataatccggctacagagagtcgcgctatttgttagcgtagggcttcagtgatatagtctgcgccatctgatcgtaagtagttggctttataaggtcagatatgccgtggttttacacggcttttttttgtataggcttcagtattcctgagtaccgtaaaccctgtcagggaataaaaaacgcgtgatgttgtctgctactcaaccacttagcgaaaaattgccagcgcatggctgccgtcatgttgcgatcattatggacggcaatggccgctgggcaaaaaagcaagggaagattcgtgcctttgggcataaagccggggcaaaatccgtccgccgggctgtctcttttgcggccaacaacggtattgaggcgttaacgctgtatgcctttagtagtgaaaactggaaccgaccagcgcaggaagtcagtgcgttaatggaactgtttgtgtgggcgctcgatagcgaagtaaaaagtctgcaccgacataacgtgcgtctgcgtattattggcgataccagtcgctttaacagccgtttgcaagaacgtattcgtaaatctgaagcgctaacagccgggaataccggtctgacgctgaatattgcggcgaactacggtggacgttgggatatagtccagggagtcaggcaactggctgaaaaggtgcagcaaggaaacctgcaaccagatcagatagatgaagagatgctaaaccagcatgtctgtatgcatgaactggcccctgtagatttagtaattaggactgggggggagcatcgcattagtaactttttgctttggcaaattgcctatgccgaactttactttacagatgttctctggcccgatttcgatgaacaagactttgaaggggcgttaaatgcctttgctaatcgagagcgtcgtttcggcggcaccgagcccggtgatgaaacagcctgatgggggtcgcttttgctgaagtatcgcctgatatctgcttttgtgttaatacccgtcgtcatcgcggcgttgtttctgttgccgccggtggggttcgccattgtaacgctggtggtctgcatgctggcagcgtgggaatggggacagcttagcggttttaccactcgtagccagcgagtatggttggcggtgttatgcgggttattgttggcgctgatgctttttctgttgccggaatatcaccgaaatattcatcaaccgctggttgaaatcagtctttgggctagcctgggttggtggattgtcgcgctattgctggtgctgttttacccaggttccgcagcaatctggcgtaactctaaaacattgcgccttatttttggcgtgctaaccattgttcccttcttctggggcatgctggcgttacgggcctggcactatgacgagaatcattacagtggcgcaatatggttgctctatgtcatgatcctggtatggggcgctgactccggcgcatatatgtttggcaaattgtttggtaaacataagctggcaccgaaggtttctccgggtaaaacctggcaaggctttatcggtggactcgctactgcagcggtaatcagttggggttatggcatgtgggcgaatctcgacgtcgctcccgtcaccttactcatttgctctattgtcgcagcgttagccagtgtgctcggcgatctgaccgagagtatgtttaagcgtgaagcaggaattaaggacagcggtcatttaattccaggacacggtggtattttagatcgtattgatagcctgacggctgcggtaccggtctttgcttgcttgttgttactggtattcaggacgctttaacggaaggtaatatgctgagttttctctgggatttggctagcttcatcgttgcactgggtgtacttatcaccgtgcatgaatttggtcatttctgggttgcccggcgttgtggtgttcgcgttgagcgtttcagtatagggtttggtaaggcgctctggcggcgaactgataagctcggcaccgaatatgttatcgccctgatcccgttgggcggttatgtcaaaatgctggatgagcgcgcagaaccggtcgttccggaactccgccaccatgccttcaataataaatctgtcggccaacgagcggcgattattgccgcaggtccggttgcaaacttcatttttgctatctttgcctactggctggtttttattattggtgtgcctggcgtacgtccggtggttggcgaaatagcagccaatagcatagctgcggaagcacaaattgcaccaggtacggaactaaaagccgtagatggtatcgaaacgcctgattgggatgccgtgcgtttgcagttggtcgataaaattggcgatgaaagcaccaccattacagtagcgccatttggcagcgaccaacggcgggatgtaaagctcgatttacgtcactgggcgtttgagcctgataaagaagatccggtatctagcctggggattcgtcctcgtgggccgcaaattgaacctgtactggaaaatgtgcagccaaacagcgcggcaagcaaggcaggtttgcaagcaggcgacaggatcgttaaagtcgatggtcagcccttaacgcagtgggtgacctttgtgatgcttgtccgggataacccgggtaaatccttagcgttagaaatcgaaaggcaggggagtcccttgtctttgacattaatcccggagagtaaaccgggtaatggtaaagcgattggttttgtcggtattgagccgaaagtcattcctttgccagatgagtataaagttgtacgccagtatgggccgttcaacgccatcgtcgaagccacggacaaaacgtggcagctgatgaagctgacggtcagtatgctgggaaaattgatcaccggtgatgtgaaactgaacaacctcagtgggccgatctctatcgccaagggggctgggatgacagcggaactcggggttgtttattacctgccgtttcttgcgcttattagcgtgaacttagggataattaacctgtttccgttgcccgtacttgacggggggcatctgctgttccttgcgatcgaaaagatcaagggcggaccggtatccgagcgggttcaagacttttgttatcgcattggcagcattctgctggtgctgttaatggggcttgcacttttcaatgatttctctcggttatgagagttagttaggaagaacgcataataacgatggcgatgaaaaagttgctcatagcgagcctgctgtttagcagcgccaccgtatacggtgctgaagggttcgtagtgaaagatattcatttcgaaggccttcagcgtgtcgccgttggtgcggccctcctcagtatgccggtgcgcacaggcgacacggttaatgatgaagatatcagtaataccattcgcgctctgtttgctaccggcaactttgaggatgttcgcgtccttcgtgatggtgatacccttctggttcaggtaaaagaacgtccgaccattgccagcattactttctccggtaacaaaagcgtgaaagatgacatgctgaagcaaaacctcgaggcttctggtgtgcgtgtgggcgaatccctcgatcgcaccaccattgccgatatcgagaaaggtctggaagacttctactacagcgtcggtaaatatagcgccagcgtaaaagctgtcgtgaccccgctgccgcgcaaccgtgttgacctaaaactggtgttccaggaaggtgtgagtgctgaaatccagcaaattaacattgttggtaaccatgctttcaccaccgacgaactgatctctcatttccaactgcgtgacgaagtgccgtggtggaacgtggtaggcgatcgtaaataccagaaacagaaactggcgggcgaccttgaaaccctgcgcagctactatctggatcgcggttatgcccgtttcaacatcgactctacccaggtcagtctgacgccagataaaaaaggtatttacgtcacggtgaacatcaccgaaggcgatcagtacaagctttctggcgttgaagtgagcggcaaccttgccgggcactccgctgaaattgagcagctgactaagatcgagccgggtgagctgtataacggcaccaaagtgaccaagatggaagatgacatcaaaaagcttctcggtcgctatggttatgcctatccgcgcgtacagagcatgcccgaaattaacgatgccgacaaaaccgttaaattacgtgtgaacgttgatgcgggtaaccgtttctacgtgcgtaagatccgttttgaaggtaacgataccagcaaagatgccgtcctgcgtcgcgaaatgcgtcagatggaaggtgcatggctggggagcgatctggtcgatcagggtaaggagcgtctgaatcgtctgggcttctttgaaactgtcgataccgatacccaacgtgttccgggtagcccggaccaggttgatgtcgtctacaaggtaaaagagcgcaacaccggtagcttcaactttggtattggttacggtactgaaagtggcgtgagcttccaggctggtgtgcagcaggataactggttaggtacaggttatgctgttggtatcaacgggaccaaaaacgattaccagacctatgctgaactgagcgtaaccaacccgtacttcaccgtagatggcgtaagcctcggtggtcgtctcttctataatgacttccaggcagatgacgccgacctgtccgactataccaacaagagttatggtacagacgtgacgttgggcttcccgattaacgaatataacagcctgcgtgcaggtctgggttatgtacataactccctgtccaacatgcagcctcaggttgcgatgtggcgttatctgtactctatgggtgaacatccgagcacctctgatcaggataacagcttcaaaacggacgacttcacgttcaactatggttggacctataacaagcttgaccgtggttacttcccgacagatggtagtcgtgtcaacctgaccggtaaagtgaccattcctggaagcgataacgaatactacaaagtgacgttagacacggcgacttatgtgccgatcgatgacgatcacaaatgggttgttctggggcgtacccgctggggttatggtgatggtttaggcggcaaagagatgccgttctacgagaacttctatgccggtggttccagcaccgtgcgtggcttccagtccaataccattggtccgaaagcagtttacttcccgcatcaggccagtaattatgatccggactatgattacgaatgtgcgactcaggacggcgcgaaagacctgtgtaaaagcgatgatgctgtaggcggtaacgccatggcggttgccagcctcgagttcatcaccccgacgccgtttattagcgataagtatgctaacagcgttcgtacttccttcttctgggatatgggtaccgtttgggatacaaactgggattccagccaatattctggatatccggactatagtgatccaagcaatatccgtatgtctgcgggtatcgcattacaatggatgtccccattggggccgttggtgttctcctacgcccagccgttcaaaaagtacgatggagacaaggcagaacagttccagtttaacatcggtaaaacctggtaagtgttctccacaaaggaatgtagtggtagtgtagcgatgactttaggcgatcaatataagatcgccgggccacgcaaagaactgcaccctccggtgcaaatgggatggtaaggagtttattgtgaaaaagtggttattagctgcaggtctcggtttagcactggcaacttctgctcaggcggctgacaaaattgcaatcgtcaacatgggcagcctgttccagcaggtagcgcagaaaaccggtgtttctaacacgctggaaaatgagttcaaaggccgtgccagcgaactgcagcgtatggaaaccgatctgcaggctaaaatgaaaaagctgcagtccatgaaagcgggcagcgatcgcactaagctggaaaaagacgtgatggctcagcgccagacttttgctcagaaagcgcaggcttttgagcaggatcgcgcacgtcgttccaacgaagaacgcggcaaactggttactcgtatccagactgctgtgaaatccgttgccaacagccaggatatcgatctggttgttgatgcaaacgccgttgcttacaacagcagcgatgtaaaagacatcactgccgacgtactgaaacaggttaaataagtaatgcctagtattcgactggctgatttagcgcagcagttggatgcagaactacacggtgatggcgatatcgtcatcaccggcgttgcgtccatgcaatctgcacaaacaggtcacattacgttcatggttaacccaaaataccgtgagcatttaggcttgtgccaggcgtccgcggttgtcatgacccaggacgatcttcctttcgcgaaaagtgccgcactggtagtgaagaatccctacctgacttacgcgcgcatggcgcaaattttagataccacgccgcagcccgcgcagaacattgcacccagtgcggtgatcgacgcgacggcgaagctgggtaacaacgtaagcattggcgctaacgcggtgattgagtccggcgttgaactgggcgataacgtgattatcggtgccggttgcttcgtaggtaaaaacagcaaaatcggtgcaggtagccgtctctgggcgaacgtaaccatttaccatgagatccagatcggtcagaattgcctgatccagtccggaacagtggtaggcgcagacggctttggttatgccaacgatcgtggtaactgggtgaagatcccacagattggtcgcgtaattattggcgatcgcgtggagatcggtgcctgcacaaccatcgatcgcggcgcgctggatgacactattattggcaatggcgtgatcattgataaccagtgccagattgcacataacgtcgtgattggcgacaatacggcggttgccggtggcgtcattatggcgggcagcctgaaaattggtcgttactgcatgatcggcggagccagcgtaatcaacgggcatatggaaatatgcgacaaagtgacggttacgggcatgggtatggtgatgcgtcccatcactgaaccaggcgtctattccagtggcattccgctgcaacccaacaaagtctggcgcaaaaccgctgcactggtgatgaacattgatgacatgagcaagcgtctgaaaagccttgagcgcaaggttaatcaacaagactaacgttccatcttttgttcgccaaactttacggcctgtctcattcttacgattgcggcaggccgtgttattattgtcgtttcttatattttgacaggaagagtatcttgactactaacactcatactctgcagattgaagagattttagaacttctgccgcaccgtttcccgttcttactggtggatcgcgtgctggattttgaagaaggtcgttttctgcgcgcagtaaaaaatgtctctgtcaatgagccattcttccagggccatttccctggaaaaccgattttcccgggtgtgctgattctggaagcaatggcacaggcaacaggtattctggcgtttaaaagcgtaggaaaactggaaccgggtgagctgtactacttcgctggtattgacgaagcgcgcttcaagcgcccggtcgtgcctggcgatcaaatgatcatggaagtcactttcgaaaaaacgcgccgcggcctgacccgttttaaaggggttgctctggtcgatggtaaagtagtttgcgaagcaacgatgatgtgtgctcgtagccgggaggcctgatacgtgattgataaatccgcctttgtgcatccaaccgccattgtggaagagggcgcgagtattggcgcgaacgcacacattggtcctttttgtatcgttggaccccatgtcgaaattggtgagggtaccgtactgaaatctcacgttgtcgtgaatggtcatactaaaattggccgcgataatgagatttatcagttcgcctccatcggcgaagttaaccaggatctgaaatatgctggcgaaccgacccgtgtggaaatcggcgatcgtaaccgcattcgcgaaagcgtcaccattcatcgtggcacagtccagggcggtggattgacgaaggtgggcagcgacaacttactgatgatcaacgcgcacattgcgcacgattgtacggtaggtaaccgctgtattctcgccaacaacgcaacgctggcgggtcacgtaagcgttgacgacttcgcgatcatcggcggcatgaccgcagtccatcagttctgcatcattggtgcgcacgtgatggttggcggctgctccggtgtggcgcaggacgtccctccttatgtcattgcgcagggtaaccacgcaacgccgttcggtgtcaatatcgaagggctgaagcgccgcggattcagccgtgaggcgattaccgctatccgcaatgcgtataagctgatttatcgtagcggtaaaacgctcgatgaagtgaaaccggaaattgctgaactggcggaaacatatccggaagtgaaagcctttaccgatttctttgcacgcagtacgcgcggtctgattcgttaatgactgaacagcgtccattaacgattgccctggtcgccggagaaacctccggcgatatcctgggggccggtttaatccgcgctctgaaagaacatgtgcccaacgcccgctttgttggtgttgccgggccacgaatgcaggctgaaggctgcgaagcctggtacgaaatggaagaactggcggtgatgggcattgttgaagtgctcggtcgtctgcgtcgcttactgcatattcgtgccgatctgacaaagcgttttggcgaactgaagccagatgtttttgttggtattgatgcgcctgacttcaatattactcttgaaggtaacctcaaaaagcagggtatcaaaaccattcattacgtcagtccgagtgtctgggcgtggcgacagaaacgtgttttcaaaataggcagagccaccgatctggtgctcgcatttctgcctttcgaaaaagcgttttatgacaaatacaacgtaccgtgccgctttatcggtcataccatggctgatgccatgccattagatccagataaaaatgccgcccgtgatgtgctggggatccctcacgatgcccactgcctggcgttgctaccggggagccgtggtgcagaagttgaaatgcttagtgccgatttcctgaaaacggcccagcttttgcgccagacatatccggatctcgaaatcgtggtgccactggtgaatgccaaacgccgcgagcagtttgaacgcatcaaagctgaagtcgcgccagaccttagtgttcatttgctggatgggatgggccgtgaggcgatggtcgccagcgatgcggcgctactggcgagcggtacggcagccctggagtgtatgctggcgaaatgcccgatggtggtgggatatcgcatgaagccttttaccttctggttggcgaagcggctggtgaaaactgattatgtcagcctgccaaatctgctggcgggcagagagttagtcaaagaattattgcaggaagagtgtgagccgcaaaaactggctgcggcgctgttaccgctgttggcgaacgggaaaaccagccacgcgatgcacgataccttccgtgaactgcatcagcagatccgctgcaatgccgatgagcaggcggcacaagccgttctggagttagcacaatgatcgaatttgtttatccgcacacgcagctggttgcgggtgtggatgaagtcggacgcgggccgttagttggcgcggtcgtcaccgctgcggtgatccttgacccggcgcgcccgattgccgggctgaatgattccaaaaagctgagcgaaaaacgccgtctggcgctctatgaagagatcaaagagaaagcgttgagctggagtctgggccgcgcggaaccccacgaaatcgacgagctgaacattcttcatgcgaccatgctggcgatgcagcgtgccgtcgctgggctgcatattgcgccggaatatgtgttgattgatggtaaccgctgcccgaaattaccgatgcctgcgatggctgtggtgaaaggcgatagccgcgtaccggaaatcagtgccgcgtctatcctggcgaaagtgacgcgtgacgccgaaatggcggcgctggatattgttttcccgcaatatggttttgcccaacacaaagggtacccaaccgcttttcatctggaaaaactggctgaacacggcgcgaccgaacaccatcggcgcagctttgggcctgtcaaacgcgcactgggacttgcgtcctgattcttgtgtcgagattaagtaaaccggaatctgaagatgtctgaaccacgtttcgtacacctgcgggtgcacagcgactacagcatgatcgatggcctggccaaaaccgcaccgttggtaaaaaaggcggcggcgttgggtatgccagcactggcgatcaccgatttcaccaacctttgtggtctggtgaagttctacggagcgggacatggcgcagggattaagcctatcgtcggggcagattttaacgtccagtgcgacctgctgggtgatgagttaacccacctgacggtactggcggcgaacaataccggctatcagaatctgacgttgctgatcagtaaagcgtatcagcgcgggtacggtgccgccgggccgatcatcgatcgcgactggcttatcgaattaaacgaagggttgatccttctttccggcggacgcatgggcgacgtcggacgcagtcttttgcgtggtaacagcgcgctggtagatgagtgtgtcgcgttttatgaagaacacttcccggatcgctattttctcgagctgatccgcaccggcaggccggatgaagaaagctatctgcacgcggcggtggaactggcggaagcgcgcggtttgcccgtcgtggcgaccaacgacgtgcgctttatcgacagcagcgactttgacgcacacgaaatccgcgtcgcgatccacgacggctttaccctcgacgatcctaaacgcccgcgtaactatagcccgcagcaatatatgcgtagcgaagaggagatgtgtgagctgtttgccgacatccccgaagcccttgccaacaccgttgagatcgccaaacgctgtaacgtaaccgtgcgtcttggtgaatacttcctgccgcagttcccgaccggggacatgagcaccgaagattatctggtcaagcgtgcaaaagagggcctggaagagcgtctggcctttttattccctgatgaggaagaacgtcttaagcgccgcccggaatatgacgaacgtctggagactgaacttcaggttatcaaccagatgggcttcccgggctacttcctcatcgttatggaatttatccagtggagcaaagataacggcgtaccggtagggccaggccgtggctccggtgcgggtagtctggtggcctacgcgctgaaaatcaccgacctcgatccgctggaatttgacctgctgttcgaacgtttccttaacccggaacgtgtctccatgcctgacttcgacgttgacttctgtatggagaaacgcgatcaggttatcgagcacgtagcggacatgtacggtcgtgatgcggtaagccagatcatcaccttcggtacaatggcggcgaaagcggtgatccgcgacgtaggccgcgtgctggggcatccgtacggctttgtcgatcgtatcagcaaactgatcccgcccgatccggggatgacgctggcgaaagcgtttgaagccgagccgcagctgccggaaatctacgaagcggatgaagaagttaaggcgctgatcgacatggcgcgcaaactggaaggggtcacccgtaacgccggtaagcacgccggtggggtggttatcgcgccgaccaaaattaccgattttgcgccgctttactgcgatgaagagggcaaacatccggtcacccagtttgataaaagcgacgttgaatacgccggactggtgaagttcgacttccttggtttgcgtacgctcaccatcatcaactgggcgctggagatgatcaacaagcggcgggcgaagaatggcgagccgccgctggatatcgctgcgatcccgctggatgataagaaaagcttcgacatgctgcaacgcagcgaaaccacggcggtattccagcttgaaagccgcggcatgaaggacctgatcaagcgtctacaacctgactgcttcgaagatatgatcgccctagtggcactgttccgccccggtccgttgcaaagtgggatggtggataactttatcgaccgtaaacatggtcgtgaagagatctcctatccggacgtacagtggcagcatgaaagcctgaaaccggtactggagccaacctacggcattatcctgtatcaggaacaggtcatgcagattgcgcaggtgctttctggttataccctcggtggcgcggatatgctgcgtcgtgcgatgggtaagaaaaagccggaagagatggctaagcaacgttctgtatttgctgaaggtgcagaaaagaacggaatcaacgctgaactggcgatgaaaatcttcgacctggtggagaaattcgctggttacggatttaacaaaagccactctgcggcctatgctttggtgagttatcaaacgttatggctgaaagcgcactatcctgcggagtttatggcggcggtaatgaccgccgatatggacaacaccgagaaggtggtgggtctggtggatgagtgctggcggatggggctgaaaatcctgccaccagatataaactccggtctttaccatttccacgtcaacgacgacggcgaaatcgtgtatggtattggcgcgatcaaaggggtcggtgaaggtccgattgaggccatcatcgaagcccgtaataaaggcggctacttccgcgaactgtttgatctctgcgcccgtaccgacaccaaaaagttgaaccgtcgcgtgctggaaaaactgatcatgtccggggcgtttgaccgtcttgggccacatcgcgcagcgctgatgaacagcctgggcgatgcgttaaaagcggcagatcaacacgcgaaagcggaagctatcggtcaggccgatatgttcggcgtgctggccgaagagccggaacaaattgaacaatcctacgccagctgccaaccgtggccggagcaggtggtattagatggggaacgtgaaacgttaggcctgtacctgaccggacaccctatcaaccagtatttaaaagagattgagcgttatgtcggaggcgtaaggctgaaagacatgcacccgacagaacgtggtaaagtcatcacggctgcggggctcgttgttgccgcgcgggttatggtcaccaagcgcggcaatcgtatcggtatctgcacgctggatgaccgttccgggcggctggaagtgatgttgtttactgacgccctggataaataccagcaattgctggaaaaagaccgcatacttatcgtcagcggacaggtcagctttgatgacttcagcggtgggcttaaaatgaccgctcgcgaagtgatggatattgacgaagcccgggaaaaatatgctcgcgggcttgctatcagcctgacggacaggcaaattgatgaccagcttttaaaccgactccgtcagtctctggaaccccaccgctctgggacaattccagtacatctctactatcagagggcggatgcacgcgcgcggttgcgttttggcgcgacgtggcgtgtctctccgagcgatcgtttattaaacgatctccgtggcctcattggtagcgagcaggtggaactggagtttgactaatacaggaatactatgagtctgaatttccttgattttgaacagccgattgcagagctggaagcgaaaatcgattctctgactgcggttagccgtcaggatgagaaactggatattaacatcgatgaagaagtgcatcgtctgcgtgaaaaaagcgtagaactgacacgtaaaatcttcgccgatctcggtgcatggcagattgcgcaactggcacgccatccacagcgtccttataccctggattacgttcgcctggcatttgatgaatttgacgaactggctggcgaccgcgcgtatgcagacgataaagctatcgtcggtggtatcgcccgtctcgatggtcgtccggtgatgatcattggtcatcaaaaaggtcgtgaaaccaaagaaaaaattcgccgtaactttggtatgccagcgccagaaggttaccgcaaagcactgcgtctgatgcaaatggctgaacgctttaagatgcctatcatcacctttatcgacaccccgggggcttatcctggcgtgggcgcagaagagcgtggtcagtctgaagccattgcacgcaacctgcgtgaaatgtctcgcctcggcgtaccggtagtttgtacggttatcggtgaaggtggttctggcggtgcgctggcgattggcgtgggcgataaagtgaatatgctgcaatacagcacctattccgttatcagcccggaaggttgtgcgtccattctgtggaagagcgccgacaaagcgccgctggcggctgaagcgatgggtatcattgctccgcgtctgaaagaactgaaactgatcgactccatcatcccggaaccactgggtggtgctcaccgtaacccggaagcgatggcggcaagcttgaaagcgcaactgctggcggatctggccgatctcgacgtgttaagcactgaagatttaaaaaatcgtcgttatcagcgcctgatgagctacggttacgcgtaattcgcaaaagttctgaaaaagggtcacttcggtggcccttttttatcgccacggtttgagcaggctatgattaaggaaggattttccaggaggaacacatgaacatcattgccattatgggaccgcatggcgtcttttataaagatgagcccatcaaagaactggagagcgcgctggtggcgcaaggctttcagattatctggccacaaaacagcgttgatttgctgaaatttatcgagcataaccctcgaatttgcggcgtgatttttgactgggatgagtacagtctcgatttatgtagcgatatcaatcagcttaatgaatatctcccgctttatgccttcatcaacacccacagcacgatggatgtcagcgtgcaggatatgcggatggcgctctggttttttgaatatgcgctggggcaggcggaagatatcgccattcgtatgcgtcagtacaccgacgaatatcttgataacattacaccgccgttcacgaaagccttgtttacctacgtcaaagagcggaagtacaccttttgtacgccggggcatatgggcggcaccgcatatcaaaaaagcccggttggctgtctgttttatgatttttcggcgggaatactcttaaggctgatgtctctattagcgtcaccgagcttggtagcttgctcgaccacaccgggccacacctggaagcggaagagtacatcgcgcggacttttggcgcggaacagagttatatcgttaccaacggaacaagcacgagcaacaaaattgtgggtatgtacgccgcgccatccggcagtacgctgttgatcgaccgcaattgtcataaaagcctggcgcatctgttgatgatgaacgatgtagtgccagtctggctgaaaccgacgcgtaatgcgttggggattcttggtgggatcccgcgccgtgaatttactcgcgacagcatcgaagagaaagtcgctgctaccacgcaagcacaatggccggttcatgcggtgatcaccaactccacctatgatggcttgctctacaacaccgactggatcaaacagacgctggatgtcccgagcattcacttcgattctgcctgggtgccgtacacccattttcatccgatctaccagggtaaaagtggtatgagcggcgagcgtgttgcgggaaaagtgatcttcgaaacgcaaagcacccacaaaatgctggcggcgttaagccaggctagcctgatccacattaaaggcgagtatgacgaagaggcctttaacgaagcctttatgatgcataccaccaccagccccagttatcccattgttgctagcgttgagacggcggcggcgatgctgcgtggtaatccgggcaaacggctgattaaccgtagtgtagaacgagctctgcattttcgcaaagaggtccagcggctgcgggaagagtctgacggttggtttttcgatatctggcaaccgccgcaggtggatgaagccgaatgctggcccgttgcgcctggcgaacagtggcacggctttaacgatgcggatgccgatcatatgtttctcgatccggttaaagtcactattttgacaccggggatggacgagcagggcaatatgagcgaggaggggatcccggcggcgctggtagcaaaattcctcgacgaacgtgggatcgtagtagagaaaaccggcccttataacctgctgtttctctttagtattggcatcgataaaaccaaagcaatgggattattgcgtgggttgacggaattcaaacgctcttacgatctcaacctgcggatcaaaaatatgctacccgatctctatgcagaagatcccgatttctaccgcaatatgcgtattcaggatctggcacaagggatccataagctgattcgtaaacacgatcttcccggtttgatgttgcgggcattcgatactttgccggagatgatcatgacgccacatcaggcatggcaacgacaaattaaaggcgaagtagaaaccattgcgctggaacaactggtcggtagagtaagcgcaaatatgatcctgccttatccaccgggcgtaccgctgttgatgcctggagaaatgctgaccaaagagagccgcacagtactcgattttctactgatgctttgttccgtcgggcaacattaccccggttttgaaacggatattcacggcgcgaaacaggacgaagacggcgtttaccgcgtacgagtcctaaaaatggcgggataacttgccagagcggcttccgggcgagtaacgtgctgttaacaaataaaggagacgttatgctgggtttaaaacaggttcaccatattgcgattattgcgacggattatgcggtgagcaaagctttctactgcgatattcttggtttcacgctgcaaagcgaagtctatcgcgaagcgcgcgacagttggaaaggggatttggcgcttaatgggcaatatgtgattgagcttttcagttttccgttcccgccggaacgacccagccgaccggaagcttgcggtctgcgtcatctggcttttagcgttgatgacatcgatgcggcagtggcgcaccttgaaagccataacgtgaagtgtgaaaccatccgtgtcgatccatacacgcaaaaacgcttcaccttctttaacgatccggacgggctgccgttggaactgtatgagcagtaaggcttgtcatcgccgcatttgcccggtaacgtgccgggcattgctactgtaaaatcgcaccatcatgacactcacgctcaatagacaacttctcaccagtcgccagattctggtggcctttagcggcgggcttgactccaccgttctgctgcatcagttggtgcagtggcggacggaaaatccgggtgtcgctctgcgcgctattcatgtgcatcacggtttaagtgccaatgccgatgcctgggttacgcattgcgaaaacgtctgccaacagtggcaggtgccgctggtggtcgaacgcgtacaacttgcgcaagaaggactgggcattgaggcccaggcgcggcaggcacgttatcaggcatttgcccgcaccttgttgcccggtgaagtgctggtcaccgcgcaacatctcgacgatcaatgtgaaacctttctgctggcgctaaaacgcggcagtggccctgccgggcttagcgctatggcggaagtcagcgagtttgccggaacgcggcttattcgcccgttgctcgcccgcacgcggggggaactggtgcagtgggcgcgtcagtatgatttacgctggattgaagacgaaagtaatcaggacgacagttacgatcgtaactttctgcgcctgcgcgtagtgccgttattgcagcagcgttggccgcattttgccgaagcaacggcccgcagcgccgcactttgtgctgaacaagagagcctgctggatgaactgctggcagatgatttagcacactgtcaaagcccgcaggggacgctgcagattgtgccaatgctggcgatgagtgatgcccgccgcgcggcgattatccgccgctggctggcagggcagaatgcaccgatgccttcccgcgacgcgttggtgaggatctggcaggaagtggcgctggcgcgggaagatgccagtccctgtttacgtttgggcgcgtttgaaatccgacgctatcagagccaactgtggtggattaaatccgtcaccgggcaaagcgaaaacattgtgccgtggcagacgtggcttcaaccgctggaattaccggcggggctgggaagtgtacagcttaatgcgggaggcgatattcgccctccgcgtgcagacgaagcggtcagcgtgcgtttcaaagcgccaggattgctgcatattgtcgggcgtaacggcggacgtaagctaaagaaaatctggcaagagctgggcgtgccgccgtggctacgtgacaccacgccactgctgttttatggcgaaacgctgattgcggcggcaggggtatttgtgacgcaagaaggtgtggctgaaggtgagaatggcgtaagttttgtctggcagaaaacgcttagttaagtgaaagccggataagacgcatcaaacgtcgcatccggcgaaagtcaatcaggattcgcttaccaccaccgtaccgatttccgggtggctaaagctggtaattttatccagacgcagctcgcgggtttcgccagcggcctcgacgaccaggtactccacatttttgcgggagactaaatcactggcttttgcctgcaatttttcgccatctttcagctcaagtgtcagcattaaatgatgctggcaggcgagctcaagattatcgtaatcatcacaattgattggttgatacgtatcattcattgacataatcgctcaccagtaagtttgccgcagcgtatgctgctttttccctgacagcctcagaaagggcgtcgtcggcagccatttcattcagcactttcaaaacgcagcccagcgcgtccggaacgtatcctaagtctccgctggcgatttccgcgtaccgcttgcgtattaactcacaatatttttccacatgccctcctgtcagcactctgacttaaccgtggatgcaagtctaagcctacgaagataaactctgtttcgcaaggtgactataccacactcatttctgcaatatcagcgccgcaactgcacgtattccgttacaatggcctcctgattcgaaaggagttttcttatggcgcttaaagcgacaatttataaagcgacggttaatgtggccgatctcgaccgcaaccagtttctcgatgcctctctgacgctggcgcgccatcctagtgaaacccaggagcgtatgatgctgcgcttgctggcgtggctgaaatatgctgatgaacgtctgcaatttacccgtggtttgtgtgccgatgatgagccggaagcgtggctgcgtaacgatcacctgggcattgatttgtggattgagctggggctgccggatgagcggcggattaagaaagcctgcacccaggccgcagaagtggcgctgtttacctataatagtcgggcggcgcaaatctggtggcagcaaaatcagagcaaatgtgtgcagtttgccaatctttccgtctggtatctggacgatgaacaactggcgaaagtaagcgcctttgccgatcgtaccatgacgctgcaggcaacgattcaggatggcgtgatctggttaagcgatgataagaataatctggaagtgaacttaaccgcctggcaacaacctagttgaactaaaccgcctggcaacaaccttcatgattgtgatttcccgacatgttgctattcccgatggtgagcttgagatcaccgccattcgtgcgcagggcgcgggcgggcagcatgttaataagaccagtacggctattcatctgcgttttgacattcgggcgtccagcctgccagagtattacaaagagcgtctgctcgccgccagccatcatttgatcagcagtgatggcgtgattgtcattaaggcacaggaataccgcagtcaggaactgaaccgcgaagcagctctggcccggctggtggctatgattaaagaattaacaacagaaaaaaaagcccgacgacccacgcggcccacccgtgcaagcaaagagcgcaggctggcaagcaaagcacaaaaaagtagcgtgaaggcgatgcgcggcaaagtgcgcagcggtcgggaataaaaagaaggaatggatggtgaaaaaagcgatagtgacagcgatggctgtaatcagcctctttactctgatgggatgtaataatcgggccgaagtcgatacgctttctccggcgcaggctgccgaactgaaaccgatgccgcaaagttggcgcggcgtgctgccgtgtgccgattgcgaaggaatcgaaacctctctgttcctcgaaaaagacggaacatgggtgatgaatgagcgttatctcggtgctcgtgaagaaccttcctccttcgcttcctacggtacatgggcgcgaaccgctgacaagctggtattaaccgacagcaaaggtgaaaagagttattatcgggcgaaaggcgatgcgctggagatgctcgatcgtgaaggcaatccgattgaaagccagttcaactatacgctggaagcggcacaatccagtttacctatgacgccgatgaccctgcggggcatgtatttttatatggctgatgcggcgaccttcactgattgcgcgaccggaaaacgtttcatggtagcgaataacgcagagctggagcgtagctacctggctgcgcgcggtcacagtgaaaaaccggtgttactgagtgtagaaggtcactttacgcttgagggtaatccggataccggtgcgccgactaaagtattggcacccgatacggcagggaaattttaccccaaccaggattgcagtagtttggggcagtaacccgtcttgagacagaaacaaacgcaaaacaggccagaaggatatatttcaacattttgaatttgcacgttttttgtaggccggataaggcgtttacgccgcatccggcaatggtgctcaacgcctgatgcgacgctggcgcgtcttatcatgcctacaacccccctcataccttaaggcggataaggcatttactttatcaccgggtcaaaccaacaaagcgacccgccttgatataaatcccaggcttcaggtgcccaacatactgtaactgcgtttctggcttaaacgcagagacatcaccaatacgcatatgcatcagatcggcagggctaatccagccgctttgcgccagtgtaagtggatgcccggctttggcaaaggcatccgtgacaaattcgctacaaaaccagctctttttgtctccttcgcccacactgcttaactgcgctttcgccaggccgctgacgcactgttggcgaaaatcctcggagaacggattcagactgcacatctggcgagtcaccataaagggaataaattcgacaatgccgcgatagttataaccgctatctttgattttattggcaaacgcggtgatatctgtggcttgttgcggggtaagatccgggactcgtaagacgaaaagcttatcactatgcttcatcgcttttttaagggaaacgatctggacgccagcgcctgtcgcttctgcaacgttattatcacccagaaagattgcaacgtgactcacagaggaagtgctgaagacgcggattccaaaactggttaccccaaggctactggagaacagcaaatcgccgggtttgagatcaggtgccgttatttcttttatactttgttcggtgaaagagctttgatgctggaatttgacagcccatgtttttgcctcggcatctactgctgtggcacttgggtctggctggctgatatcaacggtacaagcgctaagtaaaagaaagctggggagaaacaggcggcagtacgcctttggtttatccattttatacaatccatgtaaaaaaagggccctgaaattcaggaccctttctggcatcagcctttaatctgtttcaccagatattcgacgatgtcaccagtcttaattaactgtttctcgccgttgcgacgatatttatattcgatatcgtcgttgtcgaggttacggtcgcccagcacaatagtgtgcggaataccgatcagttccatatcagcaaacatcacgcccggacgctctttgcggtcatccagcagcacttcgataccttgtgcacgcagttcgctgtacagtttctcagcaagctcttgtacgcggaaggatttgtgcatgttcatcggcagaatcgccacctggaacggcgcgatagcgtcaggccatacgatgcctcgttcgtcgtagttctgctcaatcgccgcagctaccacacgcgttaccccgataccgtagcaacccatcgtcaggatttggttacggccatcttcaccctgtacggaggctttcagtgcttcggagtacttggtacccagctggaagatgtgaccaacttcgataccacgtttgatcagcagcctaccctggccatccgggcttggatcgccagccaccacgttacggatatctgcaacttccggggtagcgacatcgcgatcccagttgatgccgaagtagtgtttaccatcgatgttagcaccagcagcgaaatcactcatcgccgcaacggtacggtcaatcaccaccggaatcggcatgtttaccggacccagactacccggaccggctttaaccacggcacgaatttcttcttcggtcgcgaaagtcagcgggcttgcaacctgcggcagtttttctgctttaacttcgttcagctcgtgatcaccgcgcaccagcagcgcaacctgcgggaagctgctgccttcaaccgctttaaccagcagagtcttaaccgttttctcaatcggcagattgaactgttcaaccagttccgcgatggttttcgcgttcggcgtatcaaccagcgtcatttcctgggtagcagcagcgcgcggttctttcggcgcgatagcttctgccagttcaatgttcgctgcatagtcagaggtgtcggagaagaccacatcgtcttcaccgctctgcgccagcacctggaattcgtgagaggcgctgccgccgatagaaccggtgtcggcttgtacggcgcggaaatccagccccatgcggctgaagattttgctgtaggccgcatacattgcatcgtaggtttcctgcagggattcctgagaagtatggaaagagtaagcatctttcatcaggaattcgcgggaacgcatgacgccgaaacgcggacgcacttcgtcgcggaacttggtctggatctgatagaagttcagcggcagctgtttgtaagagctaagctcgttacgaatcaggtcagtgataacttcttcatgagttgggccgagtacgaacggacgctcgccacggtcaacaaaacgcagcagttccggaccgtactgttcccaacgaccactctcttgccacaaatcggctggctgaaccaccggcatgctcacctcgatcgcaccggcgttgttcatctcttcacgcacgatgttttcgacttttttcagaacgcgcacgccggtcggcagccaggtatataacccggaggccagcttgcggatcatcccggcgcgcagcatcagctgatggctgatcacctcggcgtcggcaggtgtctccttgagagtggagagcaggtattggctagtacgcatgttgttacggttccagttggaaggtagaacaggctcaaggcgagcctgggacaaaaaaaagtgatttagtttaccagtgcaaaagaaatgtcaaaagagaagggcgtgaatttaacgcggttccagcgcaaagacttcaaaacctgcgtcggtgacgcgccagcgaacgttaaaatcatgtagccagacggcataggttttgcccgtttcctcacctttacgataggccgggcgcgggtcctgcgccagtacttcgcggataaacagcgttaactgcggataacgcttctccagcgtcaaaagctgcttttcgacctctgcggtaaaactcaccgccatctctgcagctggcgcactttgcgcatagctggcactggcatcgggaaggctttcggcaaaggggagatacggtttgatatccactaccggcgtaccatcgaccagatccagactgccgagcttcagaatcacgctgtctttatggcaaacaacctctttcagctctaccaggctcatgccaattgggttagggcggaaagtagagcgtgttgcgaaaacccccattctggcgttaccgccgaggcgcggtggacgcacagtcggacgccagccgccttccatcgtttgatgaaagacgaaaaggatccataaatggctgaacgcttccaggccgcgaacggcgtcggcctggttgtagggagcaatgagatgcagttcgccgttggcgctttttaccagacctggctggcgcggaacggcgaacttttctttataggggctgcgaataacgcctatttgctcgaactggaaactgctcatttcgccgtaatgttaagcgcagaaccgatacatacagcctgacgatagcagcctggcgtaccgctggtgacttcgcagctatgcagtaatacagcattggctttcattttagaggcgttgatttgcatccgcttacgtgcggttggaatgctcggcggagagtcctgattagaggcctggcaagagtcgccactgacttcaccgagatcgcggaacggtttgccgactaattcttctgcattggtataaattcggaccggcgtggcgcgcggcgctttcggttttgcaggctccgctttcggctggggtgcagtgctttgaacgggttcgacaggggatctgcttaacatggaacagccgcttagcatgagtgctactaaacagatcggtaaagcacgcatagtatttcctcaatgtatgatcaaaacgtcaatattgaatcaggagcttgtaaaaatgacaagacgggcaagcgcccgtcctgaatgatattacaaattgtggaaacagcctaaaaattaccagcctttaacagctccgccgttaaacactttgtttgctgcttcgtaaacttcgtcagactgataagcctggacgaatttcttcacgttctcggcgtctttgttatcttcacgcgtcacgatcaggtttacgtacggggactctttatcttcaacaaagataccgtctttcgccggagtcaggccaatctggctggcataggtggtattgataactgccagagcgatttgcgcgtcgtccagagaacgcggcagttgcggtgcttccagttcaacaattttcagatttttggggttctcaacaacatcaagaacggtcggcagcaggccaacgccatctttcagtttgatcaagcccactttttgcagcagcagcagactacgaccaaggttagttgggtcgtttggcacggcaacctggctaccatcctgcagttcatccagacttttgattttcttggagtaaccagcaatcggataaacaaaagtgttgcctactgcgaccagtttgtagccacgatctttcagttgctgatcaaggtacggtttatgctggaaggcgttggcgtcgatatcgcctttgctcaatgcttcgtttggcagaacatagtcgttgaaggttaccagctcaacgtccaggccatatttgtctttcgcaactttctgcgcgacttctgcaacctgctgttcggcaccaacaatcacgccgactttaatgtggtttggatctttttcatcctgaccgcagcctaccagtgccagacttccgatcagggctcccactgccgcaaaggttttgaatttgaacgccataccttattccttcttcaattatttatgttgtgttgaacgttacttgcgagtgacagcccggacgatgcggtcgcctgcgaactgaattaaataaaccagaatgaccagcaataccagtaccgtattcatcaccgtcgcgttatagccgatgtagccatactgatagccaatctgacctaaaccaccggcaccgactgcaccacccatcgcggaataaccgaccagggtaatcagggtgatagttgccgcattcaccagacccggcagcgcttccggtaacagcaccttacggacgatctgcatcggcgtggcacccattgcgcgggaagcttcaattaacccggttgggatctccagcagagcgttctcgaccatacgggcaataaacggtgctgcaccaacggttaacggaacaatcgctgcctgcaaaccaatgcttgtaccgacaataacgcgggtaaacggaatcatccatacaagcaagataatgaacgggatggaacggaaaatgttcacaatcgcagaaacggtacgatacagcttcgcgttagcaataatttgccccggacgcgtgacataaagcagaacgccaaccggcagaccaatcacaaagccaaaaaaaccggatacgaaggtcattgccagcgtttcccatacgccacgaaccagcagccacatcatcggctcagacataacccagtacctctacttttacatggtgttcctgcagccaggcaatggcggcttgcgtatcttgttgtgtgccgtgcatttcagtcagcatgatgccgaacttaacgccaccggcgtaatccatctgcgcgctaataatgttgttgttgacgttgaaacgacgcgcggtttcagaaagcagtggggcatcgacgctttgaccggtaaactccagacgcagcatcggcacgcagtcagtaaatggctccgcttgcagacgttcctggtaatcttccgggatatccagatgcagggtgctctgaataaacttctgcgccagcggcgttttcggatggctgaacacttcacttaccgtgtcctgctcgatcagttctccattgctgatgaccgccacgcaatcacaaatgcgcttcacaacgtccatttcgtgggtgatcaacagaatcgtcaaccccagacggcggttgatgtctttcagcagttcgagaatagaacgtgtcgttgccgggtccagcgcgctggtggcttcatcacacagcaatactttgggattgctggctaacgcacgggcaattgccacacgttgtttctgcccaccggaaagattgctcgggtagctatcatgcttatcgccaagaccaaccaaactcagcaattccgtcacgcgacgtttgacctcgtctttcggtgtgttgtccagctccagcggcagagccacgttgccaaaaacagtacggctagagagcaggttaaaatgctggaaaatcataccaatctggcggcgagctttggtcaactcggattcactcagcgtggtcagttcctggccatcgaccagcacgctaccctcggttgggcgctccagcaggtttacacaacgtataagcgtactcttacccgcgccactggcaccgataacgccataaatttgtccagctggcacatgcaggctgacgttgttcaacgcctggatggtgcgggtgccctggtggaacactttggtgatattgctaagttttatcattgattatttattatcgtcattaagttagtcgtggcatctcgaatgcctgaaacgggcaacgccgtcaatgaaatggatgttaaggcatccagacgtctaaatcaatcaggtttatgcgaagagcactttcttgcaggtcgaaacatgcgatactagcgtcacatgccttattaaggagctataaaaggtggcgaagagcgtacccgcaatttttcttgaccgtgatggcaccattaatgtcgatcacggctatgtccatgagatcgacaactttgaatttatcgacggtgttattgacgccatgcgcgagctaaaaaaaatgggctttgcgctggtggtagtaaccaaccagtctggcattgctcgcggtaaatttaccgaagcacagtttgaaacgctgaccgagtggatggactggagcctggcggaccgagatgtcgatctggatggtatctattattgcccgcatcatccgcagggtagtgttgaagagtttcgccaggtctgcgattgccgcaaaccacatccggggatgcttttgagtgcacgcgattatttgcatattgatatggccgcttcttatatggtgggcgataaattagaagatatgcaggcagcggttgcggcgaacgtgggaacaaaagtgctggtgcgtacgggtaaacctattacgcctgaagcagaaaacgcggcggattgggtgttaaatagcctggcagacctgccgcaagcgataaaaaagcagcaaaaaccggcacaatgattaaaagatgagcggttgaaataaaaatgcatttttccgcttgtcttcctgagccgactccctataatgcgcctccatcgacacggcggatgtgaatcacttcacacaaacagccggttcggttgaagagaaaaatcctgaaattcagggttgactctgaaagaggaaagcgtaatatacgccacctcgcgacagtgagctgaaagccgcgtcgcaactgctctttaacaatttatcagacaatctgtgtgggcactcgaagatacggattcttaacgtcgcaagacgaaaaatgaataccaagtctcaagagtgaacacgtaattcattacaaagtttaattctttgagcatcaaacttttaaattgaagagtttgatcatggctcagattgaacgctggcggcaggcctaacacatgcaagtcgaacggtaacaggaagaagcttgcttctttgctgacgagtggcggacgggtgagtaatgtctgggaaactgcctgatggagggggataactactggaaacggtagctaataccgcataacgtcgcaagaccaaagagggggaccttcgggcctcttgccatcggatgtgcccagatgggattagctagtaggtggggtaacggctcacctaggcgacgatccctagctggtctgagaggatgaccagccacactggaactgagacacggtccagactcctacgggaggcagcagtggggaatattgcacaatgggcgcaagcctgatgcagccatgccgcgtgtatgaagaaggccttcgggttgtaaagtactttcagcggggaggaagggagtaaagttaatacctttgctcattgacgttacccgcagaagaagcaccggctaactccgtgccagcagccgcggtaatacggagggtgcaagcgttaatcggaattactgggcgtaaagcgcacgcaggcggtttgttaagtcagatgtgaaatccccgggctcaacctgggaactgcatctgatactggcaagcttgagtctcgtagaggggggtagaattccaggtgtagcggtgaaatgcgtagagatctggaggaataccggtggcgaaggcggccccctggacgaagactgacgctcaggtgcgaaagcgtggggagcaaacaggattagataccctggtagtccacgccgtaaacgatgtcgacttggaggttgtgcccttgaggcgtggcttccggagctaacgcgttaagtcgaccgcctggggagtacggccgcaaggttaaaactcaaatgaattgacgggggcccgcacaagcggtggagcatgtggtttaattcgatgcaacgcgaagaaccttacctggtcttgacatccacagaactttccagagatggattggtgccttcgggaactgtgagacaggtgctgcatggctgtcgtcagctcgtgttgtgaaatgttgggttaagtcccgcaacgagcgcaacccttatcttttgttgccagcggtccggccgggaactcaaaggagactgccagtgataaactggaggaaggtggggatgacgtcaagtcatcatggcccttacgaccagggctacacacgtgctacaatggcgcatacaaagagaagcgacctcgcgagagcaagcggacctcataaagtgcgtcgtagtccggattggagtctgcaactcgactccatgaagtcggaatcgctagtaatcgtggatcagaatgccacggtgaatacgttcccgggccttgtacacaccgcccgtcacaccatgggagtgggttgcaaaagaagtaggtagcttaaccttcgggagggcgcttaccactttgtgattcatgactggggtgaagtcgtaacaaggtaaccgtaggggaacctgcggttggatcacctccttaccttaaagaagcgtactttgcagtgctcacacagattgtctgatgaaaatgagcagtaaaacctctacaggcttgtagctcaggtggttagagcgcacccctgataagggtgaggtcggtggttcaagtccactcaggcctaccaaatttgcacggcaaatttgaagaggttttaactacatgttatggggctatagctcagctgggagagcgcctgctttgcacgcaggaggtctgcggttcgatcccgcatagctccaccatctctgtagtggttaaataaaaaatacttcagagtgtacctgcaaaggttcactgcgaagttttgctctttaaaaatctggatcaagctgaaaattgaaacactgaacaatgaaagttgttcgtgagtctctcaaattttcgcaacacgatgatggatcgcaagaaacatcttcgggttgtgaggttaagcgactaagcgtacacggtggatgccctggcagtcagaggcgatgaaggacgtgctaatctgcgataagcgtcggtaaggtgatatgaaccgttataaccggcgatttccgaatggggaaacccagtgtgtttcgacacactatcattaactgaatccataggttaatgaggcgaaccgggggaactgaaacatctaagtaccccgaggaaaagaaatcaaccgagattcccccagtagcggcgagcgaacggggaggagcccagagcctgaatcagtgtgtgtgttagtggaagcgtctggaaaggcgcgcgatacagggtgacagccccgtacacaaaaatgcacatgctgtgagctcgatgagtagggcgggacacgtggtatcctgtctgaatatgggggggaccatcctccaaggctaaatactcctgactgaccgatagtgaaccagtaccgtgagggaaaggcgaaaagaaccccggcgaggggagtgaaaaagaacctgaaaccgtgtacgtacaagcagtgggagcatgcttaggcgtgtgactgcgtaccttttgtataatgggtcagcgacttatattctgtagcaaggttaaccgaataggggagccgaagggaaaccgagtcttaactgggcgttaagttgcagggtatagacccgaaacccggtgatctagccatgggcaggttgaaggttgggtaacactaactggaggaccgaaccgactaatgttgaaaaattagcggatgacttgtggctgggggtgaaaggccaatcaaaccgggagatagctggttctccccgaaagctatttaggtagcgcctcgtgaactcatctccgggggtagagcactgtttcggcaagggggtcatcccgacttaccaacccgatgcaaactgcgaataccggagaatgttatcacgggagacacacggcgggtgctaacgtccgtcgtgaagagggaaacaacccagaccgccagctaaggtcccaaagtcatggttaagtgggaaacgatgtgggaaggcccagacagccaggatgttggcttagaagcagccatcatttaaagaaagcgtaatagctcactggtcgagtcggcctgcgcggaagatgtaacggggctaaaccatgcaccgaagctgcggcagcgacgcttatgcgttgttgggtaggggagcgttctgtaagcctgtgaaggtgtactgtgaggtatgctggaggtatcagaagtgcgaatgctgacataagtaacgataaagcgggtgaaaagcccgctcgccggaagaccaagggttcctgtccaacgttaatcggggcagggtgagtcgacccctaaggcgaggccgaaaggcgtagtcgatgggaaacaggttaatattcctgtacttggtgttactgcgaaggggggacggagaaggctatgttggccgggcgacggttgtcccggtttaagcgtgtaggctggttttccaggcaaatccggaaaatcaaggctgaggcgtgatgacgaggcactacggtgctgaagcaacaaatgccctgcttccaggaaaagcctctaagcatcaggtaacatcaaatcgtaccccaaaccgacacaggtggtcaggtagagaataccaaggcgcttgagagaactcgggtgaaggaactaggcaaaatggtgccgtaacttcgggagaaggcacgctgatatgtaggtgaagcgacttgctcgtggagctgaaatcagtcgaagataccagctggctgcaactgtttattaaaaacacagcactgtgcaaacacgaaagtggacgtatacggtgtgacgcctgcccggtgccggaaggttaattgatggggttagcgcaagcgaagctcttgatcgaagccccggtaaacggcggccgtaactataacggtcctaaggtagcgaaattccttgtcgggtaagttccgacctgcacgaatggcgtaatgatggccaggctgtctccacccgagactcagtgaaattgaactcgctgtgaagatgcagtgtacccgcggcaagacggaaagaccccgtgaacctttactatagcttgacactgaacattgagccttgatgtgtaggataggtgggaggctttgaagtgtggacgccagtctgcatggagccgaccttgaaataccaccctttaatgtttgatgttctaacgttgacccgtaatccgggttgcggacagtgtctggtgggtagtttgactggggcggtctcctcctaaagagtaacggaggagcacgaaggttggctaatcctggtcggacatcaggaggttagtgcaatggcataagccagcttgactgcgagcgtgacggcgcgagcaggtgcgaaagcaggtcatagtgatccggtggttctgaatggaagggccatcgctcaacggataaaaggtactccggggataacaggctgataccgcccaagagttcatatcgacggcggtgtttggcacctcgatgtcggctcatcacatcctggggctgaagtaggtcccaagggtatggctgttcgccatttaaagtggtacgcgagctgggtttagaacgtcgtgagacagttcggtccctatctgccgtgggcgctggagaactgaggggggctgctcctagtacgagaggaccggagtggacgcatcactggtgttcgggttgtcatgccaatggcactgcccggtagctaaatgcggaagagataagtgctgaaagcatctaagcacgaaacttgccccgagatgagttctccctgactccttgagagtcctgaaggaacgttgaagacgacgacgttgataggccgggtgtgtaagcgcagcgatgcgttgagctaaccggtactaatgaaccgtgaggcttaaccttacaacgccgaagctgttttggcggattgagagaagattttcagcctgatacagattaaatcagaacgcagaagcggtctgataaaacagaatttgcctggcggccgtagcgcggtggtcccacctgaccccatgccgaactcagaagtgaaacgccgtagcgccgatggtagtgtggggtctccccatgcgagagtagggaactgccaggcatcaaattaagcagtaagccggtcataaaaccggtggttgtaaaagaattcggtggagcggtagttcagtcggttagaatacctgcctgtcacgcagggggtcgcgggttcgagtcccgtccgttccgccacttattaagaagcctcgagttaacgctcgaggttttttttcgtctgtatatctattattgccagaatcgcaaaaatcctctgcattttacgctctttttcctcaacagtctgaagcccataatcacctcagttaacgaaaatagcattaaaagaggcatattatggctatccctgcatttggtttaggtactttccgtctgaaagacgacgttgttattagttctgtgataacggcgcttgaacttggttatcgcgcaattgataccgcacaaatctatgataacgaagccgcagtaggtcaggcgattgcagaaagtggcgtgccacgtcatgaactctacatcaccactaaaatctggattgaaaatctcagcaaagacaaattgatcccaagtctgaaagagagcctgcaaaaattgcgtaccgattatgttgatctgacgctaatccactggccgagtccagacgatgaagtctctgttgaagagtttatgcaggcgctgctggaagccaaaaaacaagggctgacgcgtgagatcggtatttccaacttcacgatcccgttgatggaaaaagcgattgctgctgttggtgctgaaaacatcgctactaaccagattgaactctctccttatctgcaaaaccgtaaagtggttgcctgggctaaacagcacggcatccatattacttcctatatgacgctggcgtatggtaaggccctgaaagatgaggttattgctcgtatcgcagctaaacacaatgcgactccggcacaagtgattctggcgtgggctatgggggaaggttacagtgtaattccttcttctactaaacgtaaaaacctggaaagtaatcttaaggcacaaaatttacagcttgatgccgaagataaaaaagcgatcgccgcactggattgcaacgaccgcctggttagcccggaaggtctggctcctgaatgggattaagcctctctgacagctcctccgggagctgtttttacatgctcgctaaggaaatcgataaaagcccggatgcgcgtacttaccgcacggtcgctgtaatagacggcactgaatggcatttccactggcaacactttatctgccattaactccaccaattctccgcgagcgatttctttgtcgatcatgtagtcggacaaacacgcaatcccgttgccactcaggcaaagctgtttcagtgtttccccactattggaactcaaaccgtacttcacctcatgtaattgtccatcgctacgggctatcggccaggtattgagggaagcgggttcagtgaatcccaggcaaatatgttgctttaaatcgtcgatcgtttctggcttcccgtagcgggaaatataatcgggggaggcgataatttttcgataactgttaaataacggcctggcacgtaagctggaatccgttaacgtaccagcgcgtatcgcgacatccacttttctttcgatcaaattaataatcgtttcggaggagactaggctcaaagtgacttccggatagcgttcacggaaaggcttaattaacggcatcagaaagtgcagcaccactggagttgcggcatcgatccgtaacagtccacgcggtgtattacgcgtctccataatttcactttctgccgctgccatctcctgcaaaatactctgtacgcgacgaaaataacgctcgccttcttccgtcaggctaagttgtcgcgtggtccgattaagcaggctaacgccaagtttcatctccagctttttcaccgcccggcttaccgcactgtttgcttgccctaattgttccgctgcccggctaaagctgccgctttcgacgacgctaacaaaaatggcgagttcttcgctcgtggctttcatttttgctcctgttgcaaaatagaagagatattttgaatttatttgtcattaaaccatcaggatgcgtgatatgtcatgcgatttaatgttctccataatgagcaaaattctgaccggtgtaagcacttgcttacataacaatatacaattgctcgttgaaagagtgagctaaaatccctataacagtagaaccctcccgagtgcggaagggttgacgtaatagaggtttcaaagtcaaaagtgcgaaaaaacacctatgccatgcgctatgttgccggacaacctgcggaaaggatcttaccgccggggtcttttgcgagcatcggccaggcattaccacctggggaaccgttaagtaccgaagagcgtattcggatcctggtgtggaacatatacaaacagcaacgcgctgaatggttgagcgtattaaagaactacggcaaagatgcacatctggtgttattgcaggaagcgcagacaacgccagagttagtacagtttgcgaccgctaactatcttgccgccgatcaggtacccgctttcgtgctgccacaacatccttctggcgtaatgacccttagcgcggcacatccagtgtattgctgcccgttacgtgaacgagaacccattttgcgtctggcgaagagcgcactggtgacggtctatccattacctgacacccgcctgttgatggtggttaatatacacgccgtcaacttcagtctgggcgtggatgtctatagtaagcagttacttcctattggcgatcagatagctcaccacagcggcccggtcattatggcgggagatttcaatgcctggagccgtagaaggatgaacgcgttatatcgctttgcgcgggaaatgagcctgcgccaggtgcgttttaccgatgatcagcgccgtcgggcgtttggtcgcccgctcgattttgttttctaccgtggtctgaacgtcagtgaagcttctgtactggttacgcgcgcttccgatcacaatccgctactcgttgaattcagtcccggcaagcctgataaataaggtatgagtggtctgccacagggcagaccaacgtttggcgctgcgcaaaacgtgagcgcggtggtggcgtatgacttatctgcccacatgctggatgtcgtggcacaagctgccgaagcccggcaactgaaaaatatcaccacccgccagggatatgccgaaagtctgccatttgccgataacgcatttgatattgttatcagccgttattctgcccatcactggcatgatgttggtgcagcactgcgagaagtgaataggatattgaaacctggcggtaggctgattgtgatggacgtaatgtctccgggtcacccagtgcgcgacatctggttacagacggtagaagcattacgcgatacctctcacgtacgaaactacgccagcggtgagtggttgacgttaatcaatgaagccaatctgatagttgataatttaattacagataagttaccgctggaattttctagttgggtcgcgagaatgcgtacgccagaagcgttagtagacgctattcgcatttaccaacagagcgcaagcacagaggtgagaacgtattttgccttgcagaatgatggctttttcaccagtgatatcatcatggtagatgcacataaagcggcataaataaaaaaggcaccgggggaatcggtgcctttttattatctggtttgtcaggaatctggcatgttgttgtttttcacaaacaacgtcagcttatcgcctggttgcagattcgcagtgtcgctgttccagcgcatcacatctttgatgttcacgccgtggcgtttagcaatgctactaaggctatcgcctttgcgcacacgatacgtaatgctatcgctgttgtttgccagtcgctgtgcgctactgcctgcaccaatcgtcaaactttggcctggcttcagcttagatccgcgcagtttgttccactgctgcaaatctttggtgcttacgccgagacgactagcgatactactaagcgtgtcgccagagcgtacggtgtaaacacggctgttaagcggcgtattgtcggcaaccagcgtgctctgtacagcagcaatttcgccactagccagagattcacgcagttgatctgcatgcttctttggcaccatcacgtactgcgggccacttgcgcccagcgtggagccttttacgccagcgttgaatgtcttcagcttgctgacggaaatccccgccatatctgctaccttcgccatttcaaccgggctgctcaggtgcacacgcgccagagcacggctttcatcggtcgttggcagacgtacgccataacgcttgctgtttttgagaatatcactcaatgccagcattttaggcacgtactgcttcgtttcctgcggcaacggtaagctccagaagtccgtggatttcccacgcgctttgttcgttttaattgccttcatgacccgaccttcgccgctgttataagccgctacggtcagaagccagtcgccgtcaaacattttgttcagacgctgcatcatattcagcgcggcagttgcactagcaacaacatcgcgacgcgcgtcataattgcgggtctgtttcaaaccataattgcgccccgtgctcggaatgatctgccagatgcctgcggcattggcgccagacgttgcgtgaggatcaaaagcgctctccactatgggtagtagtaccagttccataggcatgttacgttttttaacttgccctgctatccagtacatatacggctctgcccgtaaagttacatcgtggagatagctcttattgcgtaaatatttctgtttctgttcgcgaatccggtcattttccggaattcccatctttagctcgtcgccaatgaaagcccacaagtcaccatctggcgcgatagacgtcccatcgtccatccatcgtgcctgacttgtaaactttgctgcttccccttgaccagctgcagaaaggctctgtgcgtgctgttgaacgttgccggtactctggcaacccacgagcaggacagaggcgagtaatatcgcttttgccttcatgtgtgtgtcaatagttgcttaaaagacgaccgatcataacggcgaacggagccgatgacaagaaagttttatcagaacctatctttcttactccttaaccatgcaaaacgctcttcaggttgttgcaataatgtttcttcattaattacattaattaaatcaatatcttccgttcttaaaaaaacattaatttgccgctcatttttcagaattacgggtagtgttatttgattttttgcccgtaactccttaactttacgataataatcatttatggacaaatcgtgcggaagaatactcaaagcaaacttcatattacttaaggtatattcatgagcacaacataccaatgtatcgtcaggtaacgcacttaactttttaagactttgatacatttgacttgctgtcccttcaaacaaccgaccacacccaccagaaaacagtgtgtcgccgcaaaatagataaggtttactgaagtaacagatatgtcctaaagtgtgacccggcgtagcaattacactaaattcatgccccaaaacgaaggcagtttcgccatctttgactacctgtgttgttcccttatcttgtgtctcttgtggaccatacaccacaatttgtggaaacttttccaccagttcttttacgccgccaacgtgatcgtggtgatggtgggtgagaaatatggcctccggttgccagttattggcggcaatggcgtttaatactggctctgcgtctccgggatcgacaatcaggcagcgacctgcttcatcattcaaaacccagatgtaattgtcatcaaaggcgggaatactgttaagattcatagattacctctcagtgtgaaacggaaggttgtgatgaaaccggcaagagtccctcaaactgtcgtggctcctgattgctggggcgatttgccctggggaaagctttatcgcaaggcgctggagcgccagctcaacccgtggttcactaaaatgtatggttttcatctgcttaagattggcaatttaagcgcagaaatcaattgcgaagcgtgcgcggtttctcatcaagtgaatgtttctgcgcaaggaatgcccgtccaggtacaggcggacccacttcatcttccttttgccgataaatccgttgatgtttgtctactggcacatacattgccgtggtgcaccgatccgcatcgtttattgcgtgaagccgatcgggtattgattgatgatggctggctggtcattagtggcttcaatcccatcagttttatgggattacgcaaacttgtgccggtattgcgcaaaaccagcccctataacagccggatgtttactctgatgcggcagctggactggctctctttgttgaattttgaagtgctacacgccagccgtttccacgttctcccgtggaacaaacacggaggaaaactattgaatgcgcatattcctgcgcttggttgcttacaacttattgttgcccggaaacggactattcctttaacgctaaatccgatgaaacagagtaaaaacaagccacgaattcgccaggcggttggagccacccggcaatgtcgtaaaccacaggcttaaacttcaacttggtagcctgtatcttccagtgtgggattcatcgccgcggcacgagccagttcatcacagcgttcgttttccgggtgtccggcatggcctttaacccattcccatttgatttgatgctgccccaatgcagcatcaagacgttgccagagatcgacattttttactggttttttgtctgcggttttccagccacgttttttccagttatggatccactgggtgataccctggcggacatactggctgtcggtactcaaaatgacttcgcaatgttcttttaacgcctccagcgcgacaatagcggccatcaactccatacggttgttggtggtgcgggtgtagccagcgctaaaggttttctcgcgtccgcgatagcgtaaaatagcgccgtaacccccaggtcctggattgcccagacagctaccatcggtgaaaatttctacctgtttaagcatctctggtagacttcctgtaattgaatcgaactgtaaaacgacaagtctgacataaatgaccgctatgagcactgcaattacacgccagatcgttctcgataccgaaaccaccggtatgaaccagattggtgcgcactatgaaggccacaagatcattgagattggtgccgttgaagtggtgaaccgtcgcctgacgggcaataacttccatgtttatctcaaacccgatcggctggtggatccggaagcctttggcgtacatggtattgccgatgaatttttgctcgataagcccacgtttgccgaagtagccgatgagttcatggactatattcgcggcgcggagttggtgatccataacgcagcgttcgatatcggctttatggactacgagtttagcttgcttaagcgcgatattccgaagaccaatactttctgtaaggtcaccgatagccttgcggtggcgaggaaaatgtttcccggtaagcgcaacagcctcgatgcgttatgtgctcgctacgaaatagataacagtaaacgaacgctgcacggggcattactcgatgcccagatccttgcggaagtttatctggcgatgaccggtggtcaaacgagcatggcttttgcgatggaaggagagacacaacagcaacaaggtgaagcaacaattcagcgcattgtacgtcaggcaagtaagttacgcgttgtttttgcgacagatgaagagattgcagctcatgaagcccgtctcgatctggtgcagaagaaaggcggaagttgcctctggcgagcataaatacctgtgaaaggcgctaaaaatagcgacttgggcgatttttgcagcaaacgattcaaaagatgagaaaaaccgttgacgaaggtcgaggcaatccgtaatattcgcctcgttcccaacggaacacaacgcggagcggtagttcagtcggttagaatacctgcctgtcacgcagggggtcgcgggttcgagtcccgtccgttccgccactattcactcatgaaaatgagttcagagagccgcaagatttttaattttgcggtttttttgtatttgaattccaccatttctctgttcaatgattttactctggcgtaggtgcgtgattctcgcttgttgtctcattcattaaaattcaataatgatatcgaaccattcagcttaaatatatttctagagaataaatttatattgattaaatgaatgtatatttcaaattgattttgtttgttattatttaagtgaggtatataattagagtccgttatcaatgctaaatattctaatcattatgacaggcgagggagtgtccaattatgaatagtaaaaagctttgttgcatatgtgtgttattcagcctgcttgcaggatgtgcctctgaatcttctattgatgaaaagaagaaaaaagctcaagtcacacaaagtaatattaataaaaacactccccagcaactgacagacaaagatttattcggtaatgaaaccactctggccgtatccgaagaggatattcaagctgcgcttgatggagatgagttccgcgttccccttaattctcctgtaatacttgttcaatccggcaaccgcgcaccggaaaccattatgcaggaggagatgcgaaaatattatactgtttccacattctctggtatcccggacaggcaaaagcctctgacttgtaacaaaaacaaagataaaaatgagaacgaggatgttgccagtgctgagaatatgaactggatgcaggcactgcgttttgtggctgcaaaaggacatcagaaagcgattattgtttaccaggatatgttgcagacaggaaaatatgactctgcgctgaaaagtacagtatggtccgactataaaaatgacaaactcactgacgctatctccctgcgctacctggtacgtttcacgctggtggatgtggcaacaggtgagtgggctacctggagcccggtgaattatgaatataaagtgcttccaccattgcccgacaagaatgaagccagtacgactgatatgacagagcagcaaatcatgcaacttaagcaaaagacctataaagcgatggtaaaagatttggttaaccgctatcaataataaattatatctgccgccaggaatttctggcggcaataatacaaaattctttgcataagaaatttttcttgacaaagacagtgcaagaaaggacatggaatccggagttaaaaactgtttgttttagaatatttaattatttaactgctgaatcttccttgcgagaaatatatccattattacatttcatgccatttttaatatagattgctcctgggaaaattcccgtattattaccgcaggggtgataattagtattgacatatcctgtgacaaaaggagctattaaaggtgctattacgatagctattagtaaaaatataagagttagctgtattgttatgtctgtggcgaaattgactaccttcgtttttttgattaagaatgattttattatcgtaagtaaaattacatgaatatttaaaaaggaaaacgacatgaaaccgaagcacagaatcaacattctccaatcataaaatatttccgtggagcattttattattgaatatagaggtttaactccggtaaaaaacaaagaagcattgaatgcagggaaaaataatatggccataaaaaacatcgaaagaaactcttttaatttaacatgtaaacgcatggttaatcctcatatcacgggtggagtgttaagaacatacataaatggagtcatgttttcccttttccatttatcaagttcctgttgccgttttagtccatctctaattgcatattttaatttttcacttaaatggcattgagcatcgatttcatttaaaacaactgtacacactatccctgtcagtaaaattgctcctccgacaagaattactggaaagccaaagctaacacaggcaaaagaagccagacttccaatagcggttgcaacaccaccggctataactgctttggccacatccatactaaaatcgccaagaaaattaaccagatctcgctcactactcataataaattctatggttctgctgatttaaccgcagagaagttcgccacagcaatccgaaaccactggcacgtggagaataagctgcacaggcgtctggacgtggtaatgaatgaagacgactacaaaataagaagaggaaacgcagcagaattatttagtgggatacggcacattgctattaatattttgacgaatgagaaggtattcaaggcagggttaagacgtaagatgcgaaaagcagccatggacagaaactacctggcgagtgtccttgcggggagcgggcttagctaataataccccgactctccccgtccttaaacacaacccccactcaccacaacctaaactcatccgcatcctgccatgccggaaacttttctctatattcccgcaatgctgccatgctcagctccgcatcaatgcgcgttgcctgatgcgcgtcggcagtagcgataatctctccttgcggattaatcacccggctgtcaccgcgataatggcagccgttgccatcgctgccgacgcgattgcatcccgccacatacgcctgattctcaatcgcgcgggccgtcagcaatgcctgccagtgcagagagcgcggagcaggccagttggcgacgtacagggcgaggtcataatcgttgagattgcggctccacacaggaaaacgtaagtcgtagcacaccagcggcaaaatacgccagccgcgccattccacaatcactcgcgcattgcccgctttataatgtagatgctcatctgccatgcggaacagatgacgcttatcataaaaatgtaccgtgccgcccggctcaaccagcaaaaagcggttaacgctaccagactccgtttgtaatgcaacactgcctgcaatcagcgcattgcactgctgcgccttagctgtcatccagttcactacgtcatcttgtgctaggctgctagctgccgcttccatggcaaagccgctggtaaacatctccggtagaacgatcacatcgcgcccggtaataccttccagttgacgatcaaaatgacgcaggttggcaggaccatccatccacaccagtggttgctgcaaaagcgtaatcttcaaaccaggcacggtgtacaactcctttatgcgaagggttttataactttaacaccttatcaggcagttgccttagcgcagaataaattgataacaaatgctgatattggaaatatctgatttgcaaattatcgtgttatcgccaggctttaggaggttaataacatgggcaggataagcagcggaggaatgatgtttaaggcaataacgacagtcgccgctctggtcatcgccaccagtgcaatggcgcaggatgatttaaccattagcagccttgcaaagggcgaaaccaccaaagctgcatttaatcagatggtacaagggcataagctgcctgcctgggtgatgaaaggcggtacttatactcccgcacaaaccgtaacgttgggagatgagacgtatcaggtgatgagcgcgtgcaaaccgcatgactgtggcagccaacgtatcgctgtgatgtggtccgagaaatctaatcagatgacggggctgttcagcactattgatgagaaaacgagccaagagaaactcacctggctgaatgtgaacgatgcgcttagcattgatggtaaaacggtgttgttcgcggcgttgaccggcagcctggaaaaccatccggatggctttaattttaaataattagcggataaagaaacggagcctttcggctccgttattcatttacgcggcttcaactttccgcactttctccggcaactttaccggcttcgtcgccagctcttccggatcaaagtcatcaacgttaatactgcgcagacggctttcttcagctttcaccagaatagcggcttcatctttatcaatcagccccttcaccagcgcgttgtgcgccagttcatccagacgggtaaacggcaggtttttacccagctctttacagatccgctgatgaattgggtcggcggcaatcacatccaccagcgcctcttccagcaagccaaccggattatgctcgctcggcgtcaggtactgaccgcgaccaatgcgggaacgggtggcgttcggcacttgtaaaatcttcgccactttatgatccagcttgtcagaaggtgccagataatgacgtccggtcgggaagatcaccacattcagcagcccggcaaccacgcggttcgggaagttttgcagtaaatcatccatcgcctgttcagcctgatacagcgcatcttgtacgccccagtgcaccagcggcaggtcggcttcattacggccttcgtcgtcataacgcttcagcacggcagaggcgaggtagagctggcttaaaatatcccccagacgggcgctgatgcgctcgcgacgtttcaggctgccgcccagcactgccatgctgacatcagaaagcagggcgaggttggcgctcaggcggttcaggtgctgatagtagcgtttagtggcatcgccggttggcgtgctgctggttaaaccgcgcgtcaggcccagccagaagctgcgaactttgttgctaccgacgtgaccgatatgtttgaacaacagtttatcgaacgcgttgacgtcattgttcttcgccgcttccatctcttccagcacgtacggatggcaacgaatcgctccttgtccgaagatcatcatgctgcgggtcagaatgttagccccttcaacggtgatggcaatcggtgcgccctggtaagcacgcgccaggaagttgctttgcccgagcataatgcctttaccgccggtaatatccatcgcatcaataatgttctgctgcccgcggtgggtacagtgatacttaacgatagcgctcagcacggcaggtttttcgccgagcataatgccgtaggtaatcaggcttgccgcagcatccatcacgtaggcattaccggcaatacgcgccagcggctcttcaatcccttccatcttaccaatagagattttgaactgacggcgaatgtgagcatacgcgccggttgccagcgctacgcttttcacgccgccggtactgttggaaggcagggtgatgccgcggcctacgctgaggcactccaccagcatccgccagccttgcccggccattttcggcccgccgatgatgtaatcgatcggcacgaagacatctttaccgcgcgtcggtccgttctggaacggtacgttcagcgggaagtggcgacgaccaatttccacgcccggcgtggtggttgggatcagcgcacaggtaatgcctaaatcttctgcaccgccgagtaatttttccgggtcggagagtttaaacgccagcccaagcacggtcgcaatcggtgccagcgtaatgtagcgtttgttccaggtcagacgcatccccagcacctgctggccctgccattcgcccatgcagacaatcccggtgtccggaatcgcgcccgcatcggaacccgcttccgggctggtcagtgcaaagcaggggatctcctgaccacgcgccagacgcggcagatagtgatctttctgctcgtcagtgccgtaatgttgcaacagttcgcccgggcctaaactgtttggcacgccgacggtaatcgccaggatcccgctcacgccggagagtttttgcagcacgcgagactgggcataagcgctgaactccagcccgccgtactcttttttgatgatcatcgcgaagaaacgatgctctttaaggtacgcccacaactccggcggcagatccgccagctcatgggtgatctggaaatcattcgccatccggcaggcttcttctaccgggccgtcgagaaacgcttgctcttcggcggtcaggcgcggctgcggatagttatgcagctttttccagtccggcttgccctggaacaagtcgccctcccaccaggtggtgcccgcatcaatcgcttctttctcagtgcggctcatcggcggcatcaccttacggaaaccgcgaaataccggcgcggaaatcatgctcttacgcataggcgcaaagttaaatggcacgaggataatggccagaggcaccagtacccacgcgctccacagaccagcaacgccgagggcggctgtccaggcgagcaaaatcagactgctgataaataagctcacgcggtgatagaacaacgcgccgagcaggacaaccgtagcgagaatactcaaaatcatcataacgaaaagccccttacttgtaggaggtctgaccacttgtgatgatatggttgtagtggatgtaaaaacatttagcaatatgtttacaatataattacaacaaagctcacattgttgctgtttttatccgcacttcaggtcaaaaagtcctggtcatagcacctgcccgtacttctcgcttttggcggtatccggtacactgcattttgtctattacatttatgctgaaggatatcctcatgtaccaggatcttattcgtaacgaactgaacgaagcggcggaaacgctggctaactttttaaaagatgacgccaatattcacgccattcagcgcgcggcggtcctgttagcagacagctttaaagccggtggcaaagtgctttcctgcggcaacggcggttcccattgcgacgctatgcactttgccgaagagttgaccggtcgctaccgtgaaaaccgtccgggctacccggcgattgctatttctgacgttagtcatatttcctgcgtcggtaatgatttcggtttcaatgatattttctcccgctacgttgaagcggtaggtcgcgaaggcgatgtactgctggggatctccacctccggtaactctgcaaacgtgatcaaagcgatcgcagcggcgcgtgagaagggaatgaaagtgatcaccctgaccggtaaagacggcggcaaaatggctggcacggcggatatcgaaattcgcgtaccgcactttggttatgccgaccgcattcaggagattcacattaaagtgatccatatcctgatccagttgattgaaaaagagatggttaagtaagtctggcgtaggccggataagacgtttacgccgcatccggcatttgtgcgctgatgcctgatgcgacgctgacgcgtcttatcatgcctacaaatctgtacgcgaaccgtaggccgaataatgcgttcacgccgcatccgacctgaaaattcttaaatcaatcttcgccgggggccatgcgctcccgctgttgtggaggttacccatgtgcgaattgctcgggatgagcgccaacgtccctaccgatatctgctttagtttcaccgggcttgtacagcgtggtggtggaaccgggccacataaagatggctggggcattaccttttacgaaggtaaaggctgtcgcacatttaaagatccacaacccagctttaattcccccatcgccaaacttgtccaggactacccgataaaatcctgtagcgtggtggctcatattcgccaggctaatcggggcgaggtggcgctggaaaatactcacccatttacccgcgagttatgggggcgtaactggacttatgcccataacggacaactgacgggctacaaaagtctggaaaccggcaacttccgcccggtaggcgaaaccgacagcgaaaaagccttctgctggctcctgcataaattaacgcagcgttacccgcgcacaccgggcaacatggcggcggtatttaaatatatcgccagtctggcggatgaactgcggcagaagggcgttttcaacatgctgcttagcgacgggcgctatgtaatggcgtattgcagcactaatttacactggatcacccgccgcgcgccgtttggcgtggcaacgttgctggatcaggatgtggaaatcgacttcagcagccagaccacaccgaatgatgtggtcacggtgattgcaacacagccgctgacgggcaatgaaacctggcaaaagattatgccaggcgaatggcgcttattttgcctcggggagcgtgtagtttgattattttgcctcggggagcgtgtagttacttgccagttgtggctgcacaacttcgtggcttaacggcttgctgaccacgtaacgaccattgaccacagaaacggttggtggcttacgggtttgctcaaagtagtcgtaacccggcttcagttgctcccagaagtccttaaagttggaatatttatggcgcttcatattggcgtcggtcatgcggaacgggtaaatactcacttgcacgctcggctgaccaaacaccagcgcaccagtaacgaactggaatatctcatcaataccctgattggtcattgcgtagcagccgatggaaacacaatcgccgtggatcatcaggtatttcccttcataaccatgcgcacggtcataggcattggggaaaccaatattaatcgctttgtagtaacggctgtctggttttaactgattacgctggacgctataaaacccttccgggcttttgaaatcgccctgacgctgttttggccctaagccgccggaatatttacagattttatagctgtcgagcagttgatattgctcgcccattttgacgtagagatcgagcgtacgttcttccttgaagatctggatgtagacaggggatcccatcaactgctgcttatactctttgctcacaggcgtggtagagctactgctgcccagcaaaccggcaaaactaacgcacgggatcaacaacatcgcaagaattaatgcgattttacgcatactgcttattccttgataaaacggttacacacgccaggacggcaaaatggatcccaaatcggaatagtctggatttggaaggctcacattatcaccaaaagagttttacgcaagcctgtcggcgcagggtttacaaatttcatcggaagcgggctttacccaaagagcgccgcgtgagttccagttctctcaaatcgtaaaagtttatcggtaagtttgtaaatcaggatccagtccggttcgacatgagcatcgcgataacctttccaactaccttgcagcgggtggtctttataaacagctggaagcggtaaagtattattgataagaagcgtcataagatatttcaatttattcatatccttatgacgcttttgtgcaagttttacatccttactatattgtccgctgtattcaatatccctttgaatcatatttaaattcctaatttatcaaataaatcatcggcgtctttggccttatgaacatcaatgccagcttcgctgtttttgatactttgaatggttaattgattaggctcgcgtaaatcaaacggcaatgccttttcacgcgcgacctttgtgagggttatgcgaaccaggtcagagatggtcagccccatcccggccagtacgtccgctgcctgattcttcagatcttcatcgattcgggcgcgaacaaacgcgttagcagccattggggtatctcctgtgctgtatatttattcagcttgaattgtagctcaaatgagcaacagcgacaatccatgagtaatttaataaacggatgtttttacataattaactgaaatatatatgttaattttataataatggtttattaagtttgttcagaaacgatccgggatacactgcaacattaaagcatgaccagccattattgagtatgtccttgccgagcattccatcctttgtattgagcggattactgttgatttgtttgccgttttctagttttgccagcgccaccacaagtcatatctctttcagctacgccgcccgccagcggatgcaaaaccgtgcgcgtttattaaaacagtaccaaactcatctgaaaaagcaggccagctatattgtggaaggcaatgccgaaagcaaaagggcgctacgccagcacaaccgggagcagataaaacagcatccagaatggtttcctgctccgctcaaggcgagtgacagacgctggcaggcgctggcggaaaacaaccactttttaagcagcgaccatctgcataacattaccgaagtggcgattcaccgcctggagcagcagcttggcaagccttacgtctggggcggtacgcggcctgataaaggctttgactgtagcgggttggttttttatgcctacaacaagatccttgaggctaagctcccgcgcacggccaatgagatgtaccactatcgccgggcaacgattgtggcgaacaacgacctgcgccggggagatttgctgtttttccatatccacagccgcgagatagccgatcatatgggcgtgtatttgggcgatgggcaatttatcgagagcccacgtaccggcgaaaccattcggataagccgattagccgaacctttctggcaggaccattttttgggcgcgcgcaggattttgacggaagagacgattttgtaagacggataaggcgtttacgccgcatccggcagttgtacgcaggtgcctgatgcgacgctggcgcgtcttatcatgcctacgagcccgcgaatatttgcgagccgctttcccgatataaaacaacctcattgccaacctttccttttcttcttaccgttgagaaaaaggagtcgccatgtctgaatatcgtcgttattacatcaaggggggaacatggtttttcacggtgaatttacgaaatcgtcgaagccaacttttgaccacccagtaccagatgctccgtcacgccattattaaagttaagcgagacaggccttttgaaatcaacgcctgggtcgttttgccagagcatatgcactgtatctggacattacctgaaggcgatgatgatttttccagccgctggcgggaaattaaaaagcaatttacccatgcttgtggattgaaaaatatctggcaaccacgtttttgggagcacgccatccgcaataccaaagattataggcatcatgttgattatatttatataaatccagtaaagcatggttgggtaaagcaagtgagtgattggccattcagtacgttccatcgcgatgtcgcgcgagggttatatcccatcgattgggcgggggacgtaacggattttagtgccggggagcgtatcattagttaattgtgcgcagatgcctgatgcgacgctagcgcgtcttatcatgcctacaaacttgtgccggatcggtaggccggataaggcgtttatgccgcatccggcagttatgcgcagatgcctgatgcgacgctggcgcgtcttatcatgcctacaaacttgtgcctgaacggtaggacggataaggcgttcacgccgcatccggcagttgtgcaccaatgctggatacttacatcaacgcccccataatcttcaactccagctcatccggcacttcgttatacgacagcacatgcagccccggcgcaaacaaccttgcataacgcgccagcaaagggcgcagctgcggtggcaccagcagcaccgggtctttccccgccgctttcatctgctctttcacctgtggcatcgtactctggaactggttgagcatattcggatcgaccggcacgctgtcgagcatcactttcccgccctgttgcgcctgattcaccacgttggtcagcagattttccagctcattattcagcgtatacaccgtcagctcctgcttgcgaacgaacggatgggtaatgctgcgccgcaatgccaggcgcacatcggccgccagcagaatatgatctttcgtcaccgtgctactggcgaccagcacggtggcgatggtgacgatatcgcgcagggaaacgccttcggtcagcagcgcccggtacactttcagcaactggctgtaattgagcgccgcgctcaaatcttccgccagacgcggtgccgtcgacgataaacggttatgcaactgcgtaatatcatcatagttaaacaaatcaggaatatagctgcgcacaatcttatttacatgggtagcgatcacgctggcgctgtcgatcacctgataccccatattcagcgccttcgctttctgcgccgcctggatccaggtgaccggcatcccgtacgccgggtcgttcccctgcacgccgtcaatctcgccgtaggtttcgctggagggcagggccatcagtttatccgccggaatatccgcttcatcagcctttatgccgttgatgaaaatggcgtactgactgggcttaaggcggaagttttcccgaatgcggatctccggcagcagcacgccgttgccgtcagaaatcacctgccgcacgccgcgaatccgctgggtgagcgggttaccctgtgctttgtccaccagcgccaccagtttgtaaccgaggcttaaactgataggctcgatcagcggaatggtttcccaactgacctgctgctcgctggtttcggtgatggtgcgggtcagcgtttcgaggcttttctcttccgcctccgccgccagcggctgtttgctcatccgccagccggtaaaaccaagcagggcgctgaacagcaaaaacggcaggtgcggcattcccggtaccaccgccagcacgaacataatcccggtggcggtgtagagcaccgacgggcttgccagcagctggttacgcacgtcatgggcgatatcgccgttgtcgctgacgcgggtgacgataatcgccgccgcggtggagagcagcagggaagggatctgcgccaccaggccgtcgccgatggtcatcagcacatactgctggaaggcagcatcggcgctcaggttgtatttgaagatcccgatacagacgccgccgatcaggttgatcgccagaatcatcatcccggcgatggcgtccccgcgcacaaacttcgatgccccgtccatcgcgccgtagaaatcggcctcgctggcaacatctttacgccgggtttgcgcctgcgcctggttgatcaatccggcgttaagatcggcgtcaatcgccatctgtttgccgggcatcgcgtctaaggtaaagcgggcagaaacctcggaaatacgctcggcccctttggtgacgacaataaagttgattgtcaacagcgtcagtaaatccgagcgtgaaagcattatcgccgcgctgcacgggcagtcgatttttaacggtggtgggctgtcgccgttaaataaaatcagcccgtctcatccgccaaaacctgccaccgtggcggtgccggaagagacggagaaaaaagcgcgtgatgtgaatgagaaaacggcgctgctgaagaagaaatccgccaccgagcttggtgagctggcaaccagtatcaacaccattgcccgtgatgcgcatatggaagcgaatctggagatggagattgttccccagggattacgcgtgctgattaaagacgaccagaaccgcgatatgtttgaacgcggcagcgcgaagattatgccgttctttaaaacgctgctggtggagctcgcgccagtgttcgactcgctcgataataaaattattattaccgggcataccgatgcgatggcctacaaaaacaatatctacaacaactggaacctttcgggtgaccgcgcgctttcggctcgtcgggtgctggaagaggccggaatgccggaagataaagtgatgcaggtaagcgcaatggcggaccagatgctgctggattccaaaaatccgcaaagcgcgggcaaccggcgcattgagattatggtgctgaccaaaagtgcgtccgatacgctgtatcaatactttggtcagcatggggataaagtggtgcagccgctggtgcaaaagctggataagcagcaggtgctttcgcagcgaacgcgttaaatgctgaatctttacgcatttctcaaaccctgaaatcactgtatactttaccagtgttgagaggtgagcaatgcgtaaaatcattcatgtggatatggactgctttttcgccgcagtggagatgcgcgacaatcccgccctgcgcgatatccctattgctattggcggcagccgcgaacgtcggggggtgatcagcaccgccaattatcccgcgcgtaaatttggcgtacgtagcgctatgccgacagggatggcgctcaaattatgcccacatctcaccttgcttccggggcgctttgacgcctacaaagaagccagtaatcatatccgtgaaatcttcagccgctacaccagccgcattgaaccgttgagtctggatgaggcttatctcgatgtcaccgatagcgtccattgccacggttctgcgaccctcatcgcccaggaaatccgccagacaatcttcaacgagctgcaactgacggcgtctgcgggcgtggcaccagtaaagtttctcgccaaaatcgcctccgacatgaataaacccaacggccagtttgtgattacgccggcagaagttccggcatttttacaaaccttaccgctggcaaaaatccccggcgtcggcaaagtcagtgcggcaaaactggaagcgatggggctgcggacctgcggtgatgtacaaaagtgtgatctggtgatgctgcttaaacgctttggcaaatttggccgcattttgtgggagcgtagtcaggggattgacgaacgcgatgttaacagcgaacggttgcgaaaatccgtcggcgtggaacgcacgatggcggaagatattcatcactggtctgaatgtgaagcgattatcgagcggctgtatccggaacttgaacgccgtctggcaaaggtaaaacctgatttactgattgctcgccagggggtgaaattaaagttcgacgattttcagcaaaccacccaggagcacgtctggccgcggctgaataaagctgatctaatcgccaccgcgcgtaaaacctgggatgaacgccgcggcgggcgcggtgtgcgtctggtggggctgcatgtgacgttgcttgacccgcaaatggaaagacaactggtgctgggattatgatgtatactattatgtatattctggtgtgcattattatgagggtatcactgtatgcatcgaattctcgctgaaaaaagcgtcaatatcactgagttacgtaaaaacccagctaaatactttattgatcaaccggttgcggttctttctaataatcgccccgcaggatatctcttaagtgccagcgcattcgaagcgttaatggacatgcttgctgaacaagaggagaaaaagcccataaaggcgcgcttccgtccaagtgctgcaagattagaggaaattacacgccgcgctgaacaatatcttaatgatatgacggatgatgatttcaatgactttaaggaataaggatgcgggtattcaaaacaaaacttattcgcctgcaacttacagcagaggaacttgatgcgttaacggcggattttatttcctataagcgtgacggtgttttgccagatatatttggtcgcgatgcactctacgacgactcctttacctggccattaatcaaatttgagcgagttgctcatattcatctggcaaatgagaataatccatttccgccacagttgcgccaattcagcagaacgaatgacgaagcgcatttggtatattgtcagggggcgtttgatgagcaagcatggttgctcattgccattctgaaacctgaacctcataaactggctcgagataacaaccaaatgcataaaattgggaaaatggcagaagcgtttcgcatgcgtttttgaatttatattatgaataacatacaaataagaaactatcagcctggcgattttcagcaactatgcgctattttcattagagcggttacgatgaccgccagtcagcattatagtccacaacaaatttccgcctgggcgcagattgacgaatctcgctggaaggagaaactcgcgaaaagtcaagtgtgggttgcgatcattaatgcacaaccggttggttttatttcccgcattgaacattatatcgatatgttatttgttgaccctgaatacacccgccgtggggttgccagcgctttgttaaaacctttgattaagtctgaatccgaacttacggtggacgcaagcataaccgcaaaacccttttttgaacgttatggttttcagacagttaagcagcagcgcgttgaatgccggggagcgtggtttactaatttttatatgcgatataaaccgcaacattaaatccagcttgcaatgaaaataacgcccgcctggtatgtgcgcgttttctgattccacaaactgcaaggaggtaaatcatgacaaatcctttatcaatgactctttgcagacctttccaggattaattctttttttcttgccctggattcgtctgccatttcctgatttttatatttatatactctaaataattcgagttgcaggaaggcgacaagcgagtgaatcgccaggagcttacataagtaagtgactggggtgaacgaacgcagtcgcagtacatgcaacttgaagtatgacgagtataaatggaatggtacatgggcaaatatattcgtcccttatccgatgcggtatttaccatcgcatctgatgacctgtggatcgagagtttagcgatccaacaattacacaccacggcaaatttacccaacatgcagcgcgtagtggggatgccagatttacaccccggacgcggctacccgattggcgcagcgttcttctctgttggtcgtttttacccggcaagacgtcgcggtaacggtgctggaaacagaaacgggccgctactctgacacactgcgtagcgcgctggtttctctcgatggcgataacgcatgggcattaagcgaaagctggtgtggcactattcagtggatttgtccgagtccgtatcggcctcatcatgggcgcaaaaactggtttctgggcattgggcgttttaccgctgatgagcaggaacaaagcgatgcaatccgttatgagacgctgcgtagcagcgggccgggcggtcaacatgtcaataaaaccgacagcgcggtacgcgccacgcatttggcatccggtattagcgtgaaggttcagagtgagcgtagtcagcatgctaacaagcggctggcacgattgctgattgcctggaagctggagcaacagcaacaggaaaatagcgcggcgctgaaaagccagcggcgaatgttccatcaccagattgaacgtggcaacccgcgacggacatttacagggatggcttttatcgaaggataatgaaggatgaaactgccggaaggcgattaaacgccatccggcagcaaatcaaataattacttcgccggaatttctttcagcagttcagtcagcagtgtccagtaatgacctacgctttcgatgtgaacttgctcatccggagagtgtggaccggtgatagttggcccgatagaaaccatgtccatttccggatacggttttttgaacagaccacattccaggcccgcgtggataatctggatgttcggcgtcttgttgaacaggcgctgataggtttcacgtaccagatgcatcaccggagaattagcgtccggctgccagccaggatatgcgcctttcgcttcggttttcgcgccagccagtttacccaggctatccagcatgctcaccacgtagtctttaccgctgtcgatcagactacggatcaggcagtgaatttctacgttattgtcagtcatggtcaccacaccgacgttcagggaggtttcaaccacacctttggctacatcggagttacgaatcacaccgttcggggtggcgttcagcagacgaataaaggtatcgcgagatttcgcaatcagggcagctttatcgttcgctacagagtccagcaacaaggccagatttttctctttttctgccagctcgtttttcaggatctcctgataggtattcaccagagatttcaggacgtcgactttatcagctgcgacagcaatggtcgcaaaggcttcacgcgggatggcgttacgcagtgtgccgccgttgaaatcgataaggcgcagatccagttcttccgcatgacccgccaggaagcgcaccagcagtttgttggcattacccagcccaacgtggatttccccgccggagtgaccgcctttcagaccttttaaggttaacttgaaggtttcaaaaccagctggaaccgcttcacgatctaaatgcaggttggaggtgaagtcgataccccccgcacaacccatgtagatttcaccttcttcttcggagtcggtgttaatcagaatatcagcctgcaaccagttgccctgtaagccgaacgcaccgtccataccggcttcttcggtcatggtcagcagcacttccagcgggccgtgaaccacgttttcgtcagccagaaccgccagcgcagaggccataccaatgccgttatccgcacccagcgtggtgccgcgcgctttaacccattcgccatcaatataaggctggataggatctttcgtgaagtcatgcacggtgtcgttatttttctgcggcaccatatcgaggtgggcctgtaagacgaccggtttacgattttccatacctgcggtagcaggtttacgaatcaggatattacctacctgatcgcgttcgacatggaaacctttctcttttgcccaaccaacaatgtattcagcgagttgctcttcatgataggacgggtgaggaatagaacagattttggcaaaaatatcccacagcggctgtggagataattgagacagttcagacacgttaagtctccttgtcgatcacccgcaaaacagtattgcaggtcacagggttagcagaaaatgttgtcaacacaagacaggcttgcgagatatgtttgagaataccactttatcccgcgtcagggagaggcagtgcgtaaaaagacgcggactcatgtgaaatactggtttttagtgcgccagatctctataatctcgcgcaacctattttcccctcgaacactttttaagccgtagataaacaggctgggacacttcacatgagcgaaaaatacatcgtcacctgggacatgttgcagatccatgcacgtaaactcgcaagccgactgatgccttctgaacaatggaaaggcattattgccgtaagccgtggcggtctggtaccgggtgcgttactggcgcgtgaactgggtattcgtcatgtcgataccgtttgtatttccagctacgatcacgacaaccagcgcgagcttaaagtgctgaaacgcgcagaaggcgatggcgaaggcttcatcgttattgatgacctggtggataccggtggtactgcggttgcgattcgtgaaatgtatccaaaagcgcactttgtcaccatcttcgcaaaaccggctggtcgtccgctggttgatgactatgttgttgatatcccgcaagatacctggattgaacagccgtgggatatgggcgtcgtattcgtcccgccaatctccggtcgctaatcttttcaacgcctggcactgccgggcgttgttctttttaacttcaggcgggttacaatagtttccagtaagtattctggaggctgcatccatgacacaggcaaacctgagcgaaaccctgttcaaaccccgctttaaacatcctgaaaccagcacgctagtccgccgctttaatcacggcgcacaaccgcctgtgcagagcgcccttgatggtaaaaccatccctcactggtatcgcatgattaaccgtctgatgtggatctggcgcggcattgacccacgcgaaatcctcgacgtccaggcacgtattgtgatgagcgatgccgaacgtaccgacgatgatttatacgatacggtgattggctaccgtggcggcaactggatttatgagtgggccacccaggcgatggtgtggcaacaaaaagcctgtgcggaagacgatccgcaactcagtggtcgtcactggctgcatgcggctacgttgtacaacattgccgcctatcctcatctgaaaggagatgacctggccgagcaagcgcaggctttgagtaaccgcgcctatgaagaggccgctcagcgtctaccgggcacgatgcggcagatggagtttaccgtacccggcggtgcgcccatcaccggctttttgcatatgccgaaaggcgatggcccgttcccgacggtattaatgtgtggtggtctggatgcgatgcagacggactattacagcctgtatgaacgttattttgcgccgcgcggcattgcgatgctgactattgatatgccgagcgtgggcttttctagtaaatggaagctcacccaggactccagcctgttgcatcagcacgtcttaaaggcgctgcctaacgtaccgtgggtggatcacactcgcgtcgcggcctttggtttccgtttcggcgctaacgttgccgtgcgtctggcataccttgaaagcccgcgtctgaaagcggttgcctgtcttggtccggtagttcataccctgttgagtgattttaagtgccagcaacaggtgccggaaatgtatcttgacgttctggccagtcgtttggggatgcatgatgcttccgatgaagcgttgcgcgtggagctgaatcgctatagtttaaaagtgcaaggattgctgggacgtcgctgcccaacgccaatgttaagtggctactggaagaacgatccgttcagcccggaagaggacagtcgcttaatcaccagtagttctgctgacggtaaattattagagatcccatttaacccggtgtatcggaattttgacaaaggtcttcaggaaatcaccgactggatcgaaaaacgcttgtgttaaaaatttgctaaattttgccaatctggtaaaacagttgcatcacaacaggagatagcaatgacgttaccgagtggacacccgaagagcagattgatcaaaaaatttaccgcactaggcccgtatattcgtgaaggtaagtgcaaagataatcgattctttttcgattgtctggctgtatgcgtcaacgtgaaaccggcaccggaagtgcgtgaattctggggctggtggatggagctggaagcgcaggaatcccgttttacctacagttaccagtttggtctgttcgataaagcaggcgactggaagagtgttccggtaaaagacactgaagtggttgaacgactggagcacaccctgcgtgagtttcacgagaagctgcgtgaactgctgacgacgctgaatctgaagctggaaccggcggatgattttcgtgacgagccggtgaagttaacggcgtgagtgaaatgtgccggatgcatcacatccggcaatattcattaaaactgatacgtcatgccaaccgcgacaatatcatcattattaatattcaatttgttatcgctatccagttggttgattttataatcaacaaacgcactcatatttttgttgaaataatacgtagcaccgacgtcgatataattgaccagatcttcatcaccgataccttcaatatctttccctttgcttaagacataacccaggcttggacgcagaccaaagtcaaactggtattgagcgaccgcttcaaagttctgtgtcttattggcaaagccgccagttattggcgtcattttgcgtgtttcagaatagaaagttgccagataaatattattggcatcgtatttcagacctgttgcccatgcttctgcacgcttgcctgtgccacggctttgcaggttctgctcgttggtgcgatcactgttggtataggccccactaatggcgaaatcgctgccgccaaagtcatatgtcaaactcgtgccgaagccatcgccgttttgctttttaacgtcgcggttttcgtttttcccttgatattgcagggttaagttcaggccatcgataacgccgaagaagtcggtgttccgatacgtcgccagaccgctggcgcgtttggtcataaagttgtcggtctgcgcgctggaatcgccaccaaattccgggaacatatcggtccaggcttccacgtcatacaacgcccccaggttacgaccataatcgaaagaacccaaatctttatatttcaacccggcaaaagcgagacgcgttttttgctgtgcagtatcactctctgctttattaccggcaaactctgcttcccaacgaccataaccagtcagttgatcgttaatttgtgtttcgcctttgaaaccaaaacggatataactctggtcgccatctttactggcgttatcactcatataatgcatggctttaactttgccatagacatccagtttattaccgtctttattatatatttctgcagcctgtacagatgcagatgccacaatgcccatcaccactaatgccagagtgctctttttcattttcattcctgattttaattaacgcgcgaatattcagcgggagagtcccgttgaaaacaggaaagtttttaacctgagattgttaaagatatattacagattaataatattcttaaaatgtggtaatttattaaatctgtaataaaagcgtaaacaactgccgctaggcttgctgatcccgcgcaacaaaacgccatgctttgctcgcagatggttggcaaccgacgacagtcctgctaaaacgttcgtttgatatcatttttcctaaaattgaatggcagagaatcatgagtgacagccagacgctggtggtaaaactcggcaccagtgtgctaacaggcggaagccgccgtctgaaccgtgcccatatcgttgaacttgttcgccagtgcgcgcagttacatgccgccgggcatcggattgttattgtgacgagcggcgcgatcgccgccggacgtgagcacctgggttacccggaactgccagcgaccatcgccagcaaacaactgctggcggcggtagggcagagtcgactgattcaactgtgggaacagctgtttagcatttatggcattcacgtcgggcaaatgctgctgacccgtgctgatatggaagaccgtgaacgcttcctgaacgcccgcgacaccctgcgagcgttgctcgataacaatatcgttccggtaatcaatgagaacgatgctgtcgctacggcagagattaaggtcggcgataacgataacctttctgcgctggcggcgattcttgcgggtgccgataaactgttgctgctgaccgatcaaaaaggtttgtataccgctgacccgcgcagcaatccgcaggcagaactgattaaagatgtttacggcattgatgacgcactgcgcgcgattgccggtgacagcgttagtggcctcggaactggcggcatgagtaccaaattgcaggccgctgacgtggcttgccgtgcgggtatcgacaccattattgccgcgggcagcaagccgggcgttattggtgatgtgatggaaggcatttccgtcggtacgctgttccatgcccaggcgactccgcttgaaaaccgtaaacgctggattttcggtgcgccgccggcgggtgaaatcacggtagatgaaggggcaactgccgccattctggaacgcggcagctccctgttgccgaaaggcattaaaagcgtgactggcaatttcagccgtggtgaagtcatccgcatttgcaacctcgaaggccgcgatatcgcccacggcgtcagtcgttacaacagcgatgcattacgccgtattgccggacaccacagccaagaaattgatgcaatactgggatatgaatacggcccggttgccgttcaccgtgatgacatgattacccgttaaggagcaggctgatgctggaacaaatgggcattgccgcgaagcaagccagctataaattagcgcaactctccagccgcgaaaaaaatcgcgtgctggaaaaaatcgccgatgaactggaagcacaaagcgaaatcatcctcaacgctaacgcccaggatgttgctgacgcgcgagccaatggccttagcgaagcgatgcttgaccgtctggcactgacgcccgcacggctgaaaggcattgccgacgatgtacgtcaggtgtgcaacctcgccgatccggtggggcaggtaatcgatggcggcgtactggacagcggcctgcgtcttgagcgtcgtcgcgtaccgctgggggttattggcgtgatttatgaagcgcgcccgaacgtgacggttgatgtcgctagcctgtgcctgaaaaccggtaatgcggtgatcctgcgcggtggcaaagaaacgtgtcgcactaacgctgcaacggtggcggtgattcaggacgccctgaaatcctgcggcttaccggcgggtgccgtgcaggcgattgataatcctgaccgtgcgctggtcagtgaaatgctgcgtatggataaatacatcgacatgctgatcccgcgtggtggcgctggtttgcataaactgtgccgtgaacagagcacaatcccggtgatcacaggtggtataggcgtatgccatatttacgttgatgaaagtgtagagatcgctgaagcattaaaagtgatcgtcaacgcgaaaactcagcgtccgagcacatgtaatacggttgaaacgttgctggtgaataaaaacatcgccgatagcttcctgcccgcattaagcaaacaaatggcggaaagcggcgtgacattacacgcagatgcagctgcactggcgcagttgcaggcaggccctgcgaaggtggttgctgttaaagccgaagagtatgacgatgagtttctgagtttagatttgaacgtcaaaatcgtcagcgatcttgacgatgccatcgcccatattcgtgaacacggcacacaacactccgatgcgatcctgacccgcgatatgcgcaacgcccagcgttttgttaacgaagtggatagctccgctgtttacgttaacgcctctacgcgttttaccgacggcggccagtttggtctgggtgcggaagtggcggtaagcacacaaaaactccacgcgcgtggcccaatggggctggaagcactgaccacttacaagtggatcggcattggtgattacaccattcgtgcgtaaataaaaccgggtgatgcaaaagtagccatttgattcacaaggccattgacgcatcgcccggttagttttaaccttgtccaccgtgattcacgttcgtgaacatgtcctttcagggccgatatagctcagttggtagagcagcgcattcgtaatgcgaaggtcgtaggttcgactcctattatcggcaccattaaaatcaaattgttacgtaagatcttatcattctcccaccaaaaaattatcttaatgtaacagctggtgtaagtaaattctatcaacgaagatcaatcttatctactgaccaaaaaggcctgatagggcttcgctcactatacatccttggctgcaggtttagttgtacaccactcctaaatttaatgtgttggcaatgtgttcaataaagctcgaacaaattagctcattatgatcggttaatacttcaacttctggttgcatgattgtttgtccgtaaaaagataacgcgcctgccgggtagtagcaggcgcattacgcaataggtaaacaagggaggaagttcagaaatgtaaatcgggaaggttgtacgcaatgttcatcgtactacgttgttacggctttgccgcaacaagccagttgcctgccgcgctcgcagaatgtctgcagcccggagataaggagattgttcctgccagctaaatcccttcctgtcgatacgaaccagctcgtatttttctaccagaaaattcacggcatcggctagggtgataccggcatcgatagtctgtatcaggaatgttcgggttaaatatcagcaaaaagcccgcatcatgaatactggatatgaagcatgagagttacctcagtgtttatataaggattcggtccccctctctggaacggtaactctcaatctgatcggttcctgcgttagttcacatcacgactcattttttcgctctcaccggcatcccatttgccacaaaatatcccgccgtgctcctcggcagcgcttcctgtccacgaatcatatccgctattttctcgccaatcataattgtcgtggcgttcaaattcccggtgataatctgcggcataatgctcgcatccaccacacgcaggccttctaacccgtgtacgcggccttcgccgtcaaccacggacatctcgtcgtaacccattttgcaggtaccgcacggatggaaggcggtttcggcgtggttacgcacgaactcatcgagctgttcatccgtctggcattcgacaccggggctgatttcgcggccacgatactgatccagcgcgggttgatgcatgatctcgcgggtgatgcgaattgcgtcgcggaactcctgccagtcctgctcgtggctcatgtagttaaacagaatcgccggatgctggtgcgggtcgcgggatttaatccgcacatgcccacggcttgggctgcgcatactgccgacgtggcactggaaaccgtgctctttcactgcattgctgccgttatagttaatcgctactggcaggaaatggtactgaatattcggccacgcaaattcctcacggctgcgaataaatccacctgcttcaaagtggttgctggcaccaacgccagtgccgccaaacagccactccgcaccgattttcggctggttccaccactgcagggcagggtagagggaaaccggttctttgcactcatattgcagatacatctccagatgatcctgaagattttcgccgacgccgggtaattcatgcaccagcggaatatcaaactccgccagcagttcagcgttgccgacgccggagcgttgcaggatctgcggactggcaatcgcgcctgcacataacagcacttctttgttggccgttgcgcgggttgggatggtgctgtcgccttccagccattcgacgcccaccgcgcgtttgccgtcaaaaatgatgtgatcggtcatagcgtgagtacgaatggtcaggttaggacggcttttggcctgatcgagatagccacgcgcggtgctggcgcgacggccctgcggcgtgacggtgcgatccatcggaccaaaaccttcctgctgataaccgttgagatcgtccgtgcgcgggtagcccgcctgcacgcccgcttcaatcatcgcttcaaacagcggattgacgccgggtttggaggtagtgacgctcaccgggccatcaccgccgtgatagtcgttttcacccatatcgcgagtctcggccttgcggtagtagggcaggcagtcgaggtagctccagttctccagaccgggttcttgcgcccagttatcgagatccagcgcattgccacggatgtagcacatgccgttgatcaggctgcttccacccagacctttaccgcgtccgcactccatgcggcggttattcataaacggttcaggttccgtttcataggcccagttgtagcgtttaccctgtagcgggaatgccagggcagcgggcatctgggtgcggaagtcaaagcgatagtccgggccgcccgcttcaagcagcagcacggaggtattcggatcttcagtcagacgggtagcgagaacgttgccggcactgccggcaccaataatgatgtagtcaaattgcaaataaacctcctggttagaatatggactggaatttagccatctcaacctggatggacttcacctgggtgtaactctggagcgtcatcacgccgttctcgcgaccaatgccggagtgtttgtagccgccaacgggcatctctgccggggattcgccccaggtgttgatccagcaaatacccgcttccagctgatgaatgacgcgatgcgcgcggttcaggtccgctgtcacgatgcccgccgccaggccgtagtcggtatcgttagcgcggcgaatgacttcgtcttcgctctcgtaggtcagaatggacatcactggcccgaagatctcttcacgcacgatggtcatatcgtcgctgcaatcggtgaacactgtcggtgcaacccatgcgccgttatcgaagccatcgcctttcagtacatcgccgccgcacagtacgcgcgcgccttcctctttgcctttggcgatatagcgcagcacgttatcgcgatgcgggaagctgaccagcgggccgaagttagtttgcggatcgaaaacgtcgcccgcgcgaatgcgctcaacgcgcgccagaattttctgctcaaatgcggctttgcatttcgccggaacgaagacgcgggtgccattggtacacacctgaccggagctgaagaagtttgccatcatggcgatatcggcggcgagatcgagatccgcatcatcgaaaacgatcagcggacttttaccgcccagttccatggtcacttctttcagggaagaggccgcgctgttagccatcacttttttgccgctggcgacaccgccggtaaaactcactttggcaatgcccggatgctcggtcagatattgcccggtctccgcgcccacgcccggcaacacgttaaatacgccgtccggcaggcccgcttcgctgtaaatttcagccagctttaacgcggtaagcggggtaacttcgctcggtttgaaaatcattgcgttgcctgccgccagcgccggggcggatttccacagggcaatctggatcgggtagttccatgcgccaatccctgccactacgcccagcggttcgcggcgggtatacacaaaggacgtttcacgcaacgggatctggctgccttccagcgccgggatcagcccggcgtagtactccagcacgtccgcaccggtaacgatatcgacggtactggtttcgctatatgcttttccggtgtcgagggtttccagttttgcgagttcgtcattgcgttcacgcagaatatcaacggcccgacgcagaatacggctgcgctccatggcggtcatgctcgcccagattttttgcccctgctgggcgcttttcacggcgcgatcgacatcctcgcgcccggcggcctgcacggtcgccagcacgttaccgttggccgggttaatggtctcgaaggtgcgaccgctggtggcggaggtataaccaccatgtatataaagctgctgttctgccattcgggacatcacgtctcctcggttaatcggtgggtagatgctgagtgataaagtggcgggtcagggaattagcgcgggttttatccagcggtttgccgctcagagccgcgcgcagccataatccatcaatcagcgcggccaggccgtagcccgcttcctgtgcctgttcgcgcggcaattcgcgacgaaactcgctcaccagattgctcagcaagcggcggctgctgacctgctgtaaacgatagagcatcggctgatgcatactgctggcccagaacgccagccaggctttcatcgccgcactgctcacctgcgtttcatcgaagtttccgccaacaatcgcctgtaatcgctgctctgcactgccctgcggaagtgcatgtaatcgattcaaaaccgcgtcacgcagctgactggtgatatcgcgcatggttgcttccagcagaccatttttgtccctgaaatagtggctgatgatccccgtagaaacgcctgcacggcgggcgatctgcgcgatcgttgcatcgtgcatgcccacttcatttattgcttccagtgtggcgtcgatcagttgtctgcgccggatgctctgcatccccaatttgggcattttcgccactccattcatcagcggtgtttatctattaaagcggttattgattggacgttcaatataaaatgtgtcttaattgttacgaatttgattttaaatagtaacaataacagtggggatactggatgacagaccttagtcacagcagggaaaaggacaaaatcaatccggtggtgttttacacctccgccggactgattttgttgttttccctgacaacgatcctgtttcgcgacttcagcgccctgtggattggccgcacgctggactgggtttctaaaaccttcggttggtactatctgctggcggcaacgctctatattgtctttgtggtctgtatcgcttgtagccgttttggtagcgtgaagctcgggccagaacaatccaaaccggaattcagcctgctgagttgggcggcgatgctgtttgctgccgggatcggtatcgacctgatgttcttctccgtagccgaaccggtaacgcagtatatgcagccgccggaaggcgcgggacagacgattgaggccgcgcgtcaggcgatggtctggacgctgtttcactacggcttaaccggctggagcatgtatgcgctgatgggcatggcgctcggatactttagctatcgttataatttgccgctcaccatccgcagcgcgctgtacccgatcttcggtaaacggattaacgggccgataggtcacagtgtggatattgcagcggtgatcggcactatcttcggtattgccactacgctcggtatcggtgtggtgcagcttaactatggcttgagcgtactgtttgatattcccgatagcatggcggcgaaagcggcactgatcgccttgagcgtgataatcgccacgatctctgtcacctccggtgtcgataagggcattcgcgtgttaagcgagcttaatgtcgcgctggcgctgggattgatcctgttcgtattgtttatgggcgacactagcttcctgcttaatgcactggtgctgaatgttggcgactatgtgaatcgctttatgggcatgacgctcaacagttttgccttcgaccgtccggttgagtggatgaataactggacgctcttcttctgggcatggtgggtggcatggagcccgtttgtcggcttgttcctggcgcgtatcagccgtgggcgtaccattcgccagttcgtgctgggcacgttgattattccgtttaccttcacgctgttatggctcagcgtgttcggcaatagcgcgctgtatgaaatcatccacggcggcgcggcatttgccgaggaagcgatggtccatccggagcgcggcttctacagcctgctggcgcagtatccggcgtttacctttagcgcctccgtcgccaccattactggcctgctgttttatgtgaccagcgcggactccggggcgctggtgctggggaatttcaccagccagcttaaagatatcaacagcgacgcccccggctggctgcgcgtcttctggagcgtggcgattggcctgctgacgctcggcatgctgatgactaacgggatatccgcgctgcaaaacaccacggtgattatggggctgccgttcagctttgtgatcttcttcgtgatggcggggttgtataaatctctgaaggtagaagattaccgccgtgaaagtgccaaccgcgataccgcaccgcgaccgctggggcttcaggatcgcctgagctggaaaaaacgtctcagccgcctgatgaattatccgggcacgcgttacactaaacagatgatggagacggtctgttacccggcaatggaagaagtggcgcaggagttgcggttgcgcggcgcgtacgtggagctaaaaagcctgccaccggaagagggacagcagttgggtcatctggatttgttggtgcatatgggcgaagagcaaaactttgtctatcagatttggccgcagcaatatagcgtgccgggctttacctaccgcgcacgcagcggtaaaagcacctactaccggctggaaaccttcctgttagaaggcagccagggcaacgacctgatggactacagcaaagagcaggtgatcaccgatattcttgaccagtacgagcggcaccttaactttattcatctccatcgtgaagcgccgggccatagcgtgatgttcccggacgcgtgattgttattgcataaaaccgcgccatgtctgcatatggcgctgtttctcctacctcttgatacgttatatctatacggttaagcccttagtatctattgatgattaccagacaacagataataaaaaagaaaagaactattgcagcccaaaacctacatttgggctgttgcgaatgttcaataagtttagtcttatttaatgtaaatattgctgatcatttgaaatgacgcattattcatgagaaatgtgtatcgtaaatcaactgaaattaacgcaaccatttgttatttaaggtttaattatctgtgtgtgatattttattgaatgttttaaatattgtttttattggcattgctataatattggttatcatttgctgaatggattcagtcttaatgagtgggtttttaagggacaggcatagagtaatgatacgtatgcataaccaacatctttactcattatgtcattgaatgttgacgctatgtgtttatgagggagaggtattttcagttgatctggattgttaaattcatataatgcgcctttgctcatgaatggatgccagtatgtagtgggaaattataaatattgaaatagtccaactacttctttattaccaaaaatgagtatctgaattttaatattgcattcttgcgtgattatctcctgagtttgacttgtgattacctttttaaggtatttagcgtaactgtttttgagcgagcatcagaggtaaagataatcttcttgatagtgatgtgggatgttatacgtatggcatcgctgatgtttatggttaccccttatgtgtgctcaggaatcgacaggtaatcactcatactgaacagcgataaaagataaaggtgtgttcatgaatagttgtgattttcgtgtttttctgcaagagttcggtacaacggttcatttgagtttgcctggtagcgtatccgagaaagaacgactgctactcaagctgctgatgcagggaatgtctgtaacagaaataagtcagtacagaaatcgcagtgcaaagacaattagtcatcaaaagaaacagctctttgagaaactggggattcagagcgatattactttctggcgcgatattttctttcagtacaatccggagatcatatccgccacggggagtaatagtcacagatatattaatgataatcactatcaccatatcgtcacgcctgaagccatcagtctggcgttggaaaaccacgaattcaaaccgtggatccaaccggttttctgcgcgcagactggcgtactgacgggctgtgaggtgcttgtccgctgggaacatccacaaacgggaattatcccaccggatcagtttattcctctggcggagagttccggtcttattgtcataatgacccgccaactgatgaaacagactgcggatattctgatgccggtaaaacatttgctgccggacaatttccatattggcatcaacgtcagcgcgggttgttttttggcagcgggatttgaaaaagagtgtctgaacctggttaataaattaggtaacgataaaatcaagctggttctcgagctaacggaacgtaaccctattccggtaacgccagaagccagagcgatatttgacagccttcatcagcacaacattacctttgcgctggatgactttggtacgggttatgcgacctatcgttacttgcaggcgttcccggtcgattttattaagatcgataagagttttgtgcaaatggcgagtgtcgacgaaatctccggtcatattgtggacaatattgtcgaactagcgcgtaagcctggtctgagtatcgtggcggaaggggtagaaacccaggagcaggcggatttaatgatcggtaaaggcgttcactttttgcagggctatttgtactctccgccagtaccgggtaataaatttatctctgaatgggtaatgaaagcaggtggttgatgtaaaccgctattcacagcgcatcgggaggttggcagcgattaattctcccgatgcagtaaatcctgatagatccccgttaatatgccatttggcgcaaattgttttttaatccactgcgtcacctgacccgtagcagaatgctgagtcgccagtaacatgcggctatcctggcgcggattatggatttgtcgggtaaccagcagggattgcgtcatcgcctcacggaccatgtaatccggcaaaaaaccaattccttcacctaaaatctggcactgacatttggtgttgaaatctggcaccagaatactctcctgcccgtgcagcaaccagcccacttttttattaatcgtatgcgcggtgtcctccaccataatattagggtagagacgcagttggctttcggcgatgggttccggcacaaaggctaacgggtgatccggggcgatagcaaaagcccagcgaatcgcgccaatttcagtgtaatcaataccgccgccgtccagtagtgtatcgggtgcgccgatggcgatattggcctgattattaataatcgcatcccagacgccgttatacacttcggtggtgacggtaatctggcaggtaggaaactgctttttcagcacctgtaacaagcgtgcggtgtgtttgggcgtataaagcagctgattaatacaaatgcgcacacgcgcttctatgccctggctaatagtatcgattctgcgtttgatggcataaaaatcattcagcaggtcggtagctttgcggaaaaaataacgcccggactccgttaactcaatgctgcgggtactgcgagtgaacagcaccacatccagccccgtctccatacgcttaatggtgtagctaatggcggaagtggttaaacccaactcttctgcggctttactgaagctgccaaaacgcgcagcggtagtaaatgccaacagattctcttcggtaaaaatactgttcattaaaccattctcgccattatctactatgaatttctccagctatgactgtagaggtatcggttaaagatagataatcatttttgaataacttttaatacccgtcgcgtttagtcgtcgcttcgcttaatttttgtccaccatattcactaattacccccacgcagttacccgccagaaaacccagtaacgtcaccgtccagttcatcccgctggcaaaaaacagcgtcatgccgagaaagccaccgggaataaaggacagtaaccagaaacgcccttgccagaccactaccgcgctgaagggtacggtagtaattacgctcgcccagaacgcggacagtccacttacagaggccagccaaccagcagtcagcgcggcgaaaaacgcccacaccatcccggaataattaaccgccagacttctgataaacccgcttttaccgccgcctgcggcataaaaactgcaaaaggcgacgaagccaatggttcctaataattcccatccttgagagagcccgacatgactagacactaactgccaaagccctgcacaaataccgacggtgacacccgttgccgtgagtccgttcatcttgttcccctctggttagacatggacgaaagctactcttacatgtgcagactatagagaaataaaacctgattgagtgaaagggtatcgggtcaaagaaacaaatattgcactaccgcacactgcgaaaagattgttgaatattattcaacaaaaaggcgagatacggcgaattaaatttaagcgggttcttttatcagattatcgttgctattctcaattcatcgaaaacagccacaaaaaccaggggaatgtgaatgagtataaaaaatctacctgccgactatttattggctgcacaacagggtgatatcgataaagtaaaaacctgccttgcgctgggtgtcgatattaatacctgcgatcgtcaggggaaaacggcaattacgctggcaagtttatatcagcaatatgcttgcgttcaggcattaattgatgccggagcggatattaataagcaagattatacctgtttaaatccttttttaattagctgtctgaacgatgatttaacgctactacgaattattttaccggctaaacccgatcttaattgcgtaacccgttttggcggtgtcggcctgacgcctgcctgtgaaaaaggccatttaagtattgtaaaagagcttttggcgcatacggagattaacgttaaccagaccaaccatgtaggctggacgccgctactggaagcgattgtgcttaatgatggtggtattaaacagcaggcgattgtgcagttattgctggaacacggtgccagcccgcatctgaccgataaatatggcaaaacgccactggaactggcgcgggaacggggctttgaagagattgcgcagttactgattgccgcaggtgcataaaccgggaggcttgctatcaacacaccagaaagacggtgtgtgtgggcgctaactgcggatgcggattttctggcgcagcgggggcaaggacaggttgaacaggtctttgccagagcggtaaatatcgcactcccggctcgccagcagttgctgacgctgctttgtgaagagtacgacaatgcgccaaacagttgtcggttggcactcactcactttgatgatctgttccggcatggtgataaggttcagtttgacgatcaaggtattacggttggtcaacatcttcatatagagatgagtcgttgtcggcgttggctgtccccaaccttgcaaatgaccgctgtgaattttcaccttatcgcctggctacagtggcacgacattattcatcagcacctgggggaaaatgaaaccctgtttaattatcgcggcgataatccgttttatcaggcgttaaataaagaattacatattaaacgacgggcagttattcaggccgtaaacgataaacaaaatatcgccagtgcggtcgccagtatgatggggttagggattggccttacgccaagtgccgacgattatttaacaggtctggcgcttattttatttattcccgggcatccggcggaaaaatacaaagaggaattttatctcggtctgcaacgcggcaaaaataataccacattattaagtgccataacgctggaagccgcattacaacaacgctgccgggaaaatattcatcgttttattcacaacattatttatgacatccctgggaacgcaactcaggcaatagaaaaaattaaacatattggctccagttccggctgcgacatgctgtatggcatggccgatggttgtgcgctgagccaaacctacggagggaattatgtcagttaattaaccaaacctacggagggaattatgagtgttaaaatagtcattaaaccgaatacctattttgattctgtcagcctgatgtctatctccacgcgtgcaaataaactcgacggcgtcgagcaggcatttgtggcgatggcgaccgaaatgaataaaggcgtgctgaagaatttaggactgctgacgccggagctggagcaggcgaaaaacggcgacctgatgattgtcatcaatggtaaaagcggtgcggacaacgagcagttactggtggagattgaagaactgttcaacaccaaagcgcaaagcggcagccacgaggcgcgttacgccactattggcagcgccaaaaagcatatcccggaaagtaacctggcggtgattagcgtcaacggtctgtttgccgctcgcgaagcgcgtcaggcgctgcaaaacgatctcaacgtgatgctgttttccgataacgtcagtgttgaagatgaactggcgctcaagcaactggcccacgaaaaagggctgctgatgatggggccagactgtggcacggcgattatcaacggcgcggcgctctgttttggtaacgccgtgcgtcgcggcaacatcggtattgttggcgcatccggcaccggcagtcaggagttgagcgtccgcattcatgaatttggcggcggcgttagccaactgattggcaccggcgggcgcgacctgagcgagaaaatcggcggcctgatgatgctcgacgccatcgggatgctggaaaacgatccgcaaactgaaatcattgcgcttatctccaaaccgcctgcgcctgcggtggcccgcaaagtgctggaacgtgcgcgcgcctgccgcaagccggtggtcgtctgcttcctcgatcgtggcgaaacgccagtggatgagcaggggctacagtttgcccgcggcaccaaagaggcagcgctaaaagcggtgatgctctccggcgtgaaacaggaaaatctcgacctgcatacgcttaaccagccgttgattgcggatgtgcgtgcgcgtctgcaaccgcagcagaaatacattcgtggcctgttctgcggcggcacgctgtgcgacgaaaccatgttcgcggtgatggaaaaacatggcgatgtctacagcaacattcagcccgatccggaattccgcctgaaagatatcaaccgcagcatcaaacacaccttcctcgactttggcgatgacgacttcaccaatggcaagccgcacccgatgattgaccccaccaaccgcatcagtcgcttgatcgaagaggcgcgcgatccagaagtggcggtgatcgtgatggattttgtgctcggatttggaagccatgaagatccggtcggctccaccatcgagacgatcaaagaagcgaaagcgatcgccgctgccgaaggacgcgagttgatcattctcgcctatgtgctgggtaccgatcttgatacgccaagcttagaacaacaaagccagatgctgcttgatgccggagtgattctggcgagcagcagcaccaataccggattgctggcgcgtgaatttatctgcaaaggggaggaagcctgatgagccagagtctgtttagccaaccattgaacgttattaacgtcggcatcgccatgtttagcgatgacctgaaaaagcagcatgtagaagtgactcaactcgactggacgccgccggggcagggcaatatgcaggtggtgcaggcgctggataacattgccgatagcccgctggcggacaaaatcgccgccgctaaccagcaggcgctggagcgtattatccagagccatccggtgctgattggttttgatcaggcgattaacgtggtgccgggcatgacggcgaaaaccattcttcacgccgggccgccgatcacctgggaaaaaatgtgcggcgcgatgaaaggcgcggtcaccggagcgctggtgttcgaaggactggcgaaagatctcgacgaggcggctgaactggcggcttccggggagatcaccttcagcccgtgtcacgagcacgactgcgtgggaagcatggcgggtgttaccagcgccagcatgtttatgcacatcgtaaaaaacaaaacctacggcaacatcgcttataccaacatgagcgagcagatggcgaagattttgcgtatgggcgctaacgaccagagcgtgattgaccgcctgaactggatgcgtgatgtgcagggaccaatactgcgcgacgcgatgaaaattatcggcgaaatcgatctgcgcttaatgctggcgcaggcgctgcatatgggcgatgagtgccataaccgcaataacgccgggacgacactgctgattcaggcgctgacgccggggattattcaggcgggttattccgtcgagcaacagcgcgaagtgtttgagtttgtcgccagcagcgactacttctccggcccgacgtggatggcgatgtgtaaagcggcgatggatgcggcgcatggcatcgaatacagcaccgtggtcaccaccatggcgcgtaacggcgtcgagttcggcctgcgggtcagcggcctgccggggcaatggtttaccggcccggcgcagcaggtgatcggcccgatgtttgccggttataagccggaagatagcgggctggatatcggcgacagcgccatcaccgaaacctacggtattggcggatttgctatggcgaccgcgcccgctatcgtcgcgctggtgggcggcacggtggaagaagctattgatttctcccgtcagatgcgcgaaatcaccctcggtgaaaaccccaacgtcaccattccgctgctcggttttatgggcgtgccgagcgcaatcgacatcacccgcgtgggtagcagcggcattctgccggtgatcaacaccgccatcgcccataaagatgcgggcgtcggcatgattggcgcgggcattgtgcatccaccttttgcctgcttcgagaaagccattcttggctggtgcgaacgttacggcgtctgacctacatgttcatgccggatgcggcgtgaacgccttatccggcctacgaatggcgcaagaatctgtaggcctgataagcgtagcgcatcaggcatttgtcaccattgccggatgcggcgtgaacgccttatccggcctacgaatggcgcaagaatctgtaggcctgataagcgtagcgcatcaggcatttgccaccactgccggatgcggcgtggacgccttatccggcctacgagtggcgcgagaatctgtaggcctgataagcgtagcgcatcaggcatttgtcaccattgccggatgcggcgtgaacgccttatccggcctacgagtggcgcgagaattgtaagcctgataagcgtagcgcatcaggcagtctggcgttggtcataaccccatcaccctctgtagcggacataacaacatgaaagagcttgtggtcgttgccattggtggcaacagcattatcaaagataacgccagccagagcattgagcatcaggcggaggcggtgaaagccgtcgccgatacggtgctggaaatgctggcttccgattacgacattgtgctgacccacggcaacgggccgcaggtcgggctggatttacgccgtgcggagattgcccacaagcgcgaagggctgcccttaacgccgctggcgaactgtgtggcagatacgcagggcggcatcggctatctgatccaacaggcgctgaataaccggctggcgcgtcacggcgagaagaaagccgtcaccgtggtgactcaggtggaagtggataaaaacgatccaggttttgcccatcccaccaagcccatcggcgcattctttagtgacagccagcgtgacgaattacaaaaggcaaaccctgactggtgttttgttgaagatgccgggcggggctatcgccgcgtggtcgccagcccggaaccgaaacgtattgtcgaagcacctgccattaaagcgctgatccaacaaggttttgtcgtaattggcgcgggcggcggtggaattccggtagtgcgtactgacgcgggagattaccaaagcgtggacgcggttatcgacaaagatctctctaccgcgctgctggcccgtgaaattcacgccgacattcttgtgatcaccactggcgtcgaaaaagtgtgtattcactttggcaaaccgcagcagcaggcgctcgatcgggtggatattgccaccatgacccgctatatgcaggaagggcatttcccgcccggcagcatgttgccaaaaatcatcgccagcctgacatttttagaacaaggcggcaaagaagtgattatcaccacgccggaatgcctgcctgcggcgctgcgcggcgaaacgggcactcatattattaaaacgtaaggacgtaagatgaaagaaagcaatagccgccgtgaatttctgagccagagcggtaagatggtcaccgccgccgcgctgtttggtacctctgtgccgctcgcccatgcggcggtagctggcaccctaaactgcgaagcgaacaacaccatgaaaatcactgacccgcattactatctcgataacgtgctgctggaaaccggttttgactacgaaaatggcgtggcggtgcagacccgcacggcgcgccagaccgtggagattcaggacggcaaaattgtcgccctgcgcgagaacaagctgcatccggacgccacgctgccgcactatgacgctggcggtaagctgatgctgcccaccacccgcgacatgcatattcatctcgacaaaaccttttacggcgggccgtggcgcagcctcaatcgtccggcaggcaccaccatccaggacatgatcaaactcgagcagaaaatgctgccggaactgcaaccgtacactcaggagcgggcagaaaaactgattgatttattgcagagcaaaggcaccaccattgcccgcagccactgcaatatcgaaccggtttccggcctgaaaaatctgcaaaatttgcaggcggtgctggcgcgacgtcaggcgggctttgagtgtgaaatcgtcgccttcccgcagcacggtttgctgctgagcaaatctgaacctttaatgcgtgaagcgatgcaggcgggggcgcattacgtcggcggcctggacccgaccagtgttgatggcgcgatggaaaaatccctcgacaccatgttccagattgcgctggactacgacaaaggcgtcgatattcacctgcacgaaaccactccggcaggcgtggcagccatcaattatatggttgaaacggtagagaaaacgccacagctgaagggcaagctgaccatcagtcacgcctttgcgctggcaacgctcaacgagcaacaggtagatgaactggcgaaccggatggtggtgcaacaaatttctatcgccagcacggtgccgattggcacgctgcatatgccgctcaaacagttgcacgacaaaggcgtaaaagtgatgactggcactgacagcgttatcgaccactggagcccttatggtctgggcgacatgctggaaaaagccaatctgtacgcgcagctctatattcgtcctaacgaacagaacctctcccgcagcctgtttttagccactggcgatgtattgccgctgaatgaaaaaggcgagcgtgtatggccaaaagcgcaggatgacgccagctttgtgctggtggacgcctcctgttccgccgaggcggtggcgcgtatcagcccgagaaccgcaacgttccataaagggcaactggtgtgggggagtgtggcaggttgatgcgcatttgaaacgcctgcaacggtgaatagtaagagatttaagccccagggagtggggcaatctgaatatgagtgtgtcggcagaaatggacattatctttgaggaatatgcccttattgacgttgtgtagataactatttgtctacgtgaaaagatcatcagttttgccgattttagtcttttacagatagcaaatatcacacttacaggcgctcgccttatggggaacgttgctgctctgtttcattcaggctcgcggcatgttggggctggatcgggtggtttaaatattggctatattcaatggacgcgttttgccgcgatgacatatcaggcgttgccaaatacacatagctaatcaggagtaaacacaatgaagatcaaagctgttggtgcatattccgctaaacaaccacttgaaccgatggatatcacccggcgtgaaccgggaccgaatgatgtcaaaatcgaaatcgcttactgtggcgtttgccattccgatctccaccaggtccgttccgagtgggcggggacggtttacccctgcgtgccgggtcatgaaattgtggggcgtgtggtagccgttggtgatcaggtagaaaaatatgcgccgggcgatctggtcggtgtcggctgcattgtcgacagttgtaaacattgcgaagagtgtgaagacgggttggaaaactactgtgatcacatgaccggcacctataacagcccgacgccggacgaaccgggccatactctgggcggctacagtcaacagatcgtcgttcatgagcgatatgttctgcgtattcgtcacccgcaagagcagctggcggcggtggctcctttgttgtgtgcagggatcaccacgtatagcccgctacgtcactggcaggccgggccgggtaaaaaagtgggcgtggtcggcatcggcggtctgggacatatggggattaagctggcccacgcgatgggggcacatgtggtggcatttaccacttctgaggcaaaacgcgaagcggcaaaagccctgggggccgatgaagttgttaacagtcgcaatgccgatgagatggcggctcatctgaagagtttcgatttcattttgaatacagtagctgcgccacataatctcgacgattttaccaccttgctgaagcgtgatggcaccatgacgctggttggtgcgcctgcgacaccgcataaaagcccggaagttttcaacctgatcatgaaacgccgtgcgatagccggttctatgattggcggcattccagaaactcaggagatgctcgatttttgcgccgaacatggcatcgtggctgatatagagatgattcgggccgatcaaattaatgaagcctatgagcgaatgctgcgcggtgatgtgaaatatcgttttgttatcgataatcgcacactaacagactgaaaaaattaataaataccctgtggtttaacatattaacttcgctctccacttaactttttagttaaggagagcgaaataatatcaaagtagcagtaaaacctataacgtaaatttaaattgttaaattaacgccctccagtacacaatacttcacacgttagttatgagcgatttctgatagtgcctggtttaatcagagctttattatctgcgacgtttatttttatttaagagagatcgcgatgataagtttaaaagctccgcacaataatttgatgccatatacgcaacaaagcatacttaatacggttaaaaacaatcagttaccagaggatatcaaaagctccctggtttcctgtgtcgatatattcaaggttttgattaaacaatattatgattatccttatgattgtcgtgatgatttagtcgatgacgacaaactcattcatctcatggctgccgtacgagactgtgagtggagtgacgataacgcactcaccataaatgtgcagtttaatgatttccctggattttatgactggatggattaccctgatcacccggttaagtttgtttttcacatacttgaaaatcaaaaagggacagtttgggtatatgaccaggatgatgcgtttcttgatattaaagcaaacgtgcaggctggacgctttaccgggcttaagaaattagtgcagtttatcgatagtgtgcgaacagattgcaaatgtattcttcttgaataccatatgcctttgctgagaattttccctaaagggaaagagtgtatgcatgtggaaaaatggcttcgcgaaatgagctctattccggagacagacgcgcccattaagcaggcgcttgcgcatggattattattacacttaaaaaatatctaccctgtttttcctgaaagtctggtgatgttattgctctctgttctggacgtaaaaacatacagagatgatgcgcgattaaatgaatggatatctaatagagtgcaggaattaggtgacagatattatcctgtaaataagcacgttaaaatccgctacactctttaattcagaaagggttccacctgcaagttgttattccacctgagagtgaatcgcaatgcaggtaatcatttcatctgtatatctgtatgccaactggcattccatctcttttttcgccgatattttgttgtgatcggcgacacttcgcttaaaaaagcaccagtagtggtttcgcagccatgcggtgtataaaaaatgatctcatgcagatgttttgtgaatgtgttggttgacattcatatgaaaaaaatcataattccatcatgtttgtgtggggtcttttctgtatcttacgcatcgcactcaagcctgacagaaaatatgctgtaaggctcatatcaaaaaccgccattagctcatcaggaagagcagacgacaaccaggattgttgtatggtacggggttcgaggcctcgatggcggtccaacttttcaaaactcttctgaatcagatccccttattaagttccctgcaaagtggaacattgccattgtttggctatagtggatggggcagaccaatgaaaaaagcccacacaggggagagtgggctgaaatgggaggctaaagacagtagtaaacttatcggaaataaggaccacgcattacgggggctaagtagcccgatggccgtgattcggcaaatcaggttgattacgtaaagagtaaattatctgctcaccgctgcgtcaccccttcgtaaatcaggcgtagcgcgaatacaccaataattgcaccaataacccgactggcaacgcgttgcatacgcccataagcacgacgcacagcgggcaaagaaaacgcctgactaagaaaaactcgccagataatacttgcgagcacaatccccgcccaggccattaaacgtgcccatgttggtgtttctgcatttaatgttacactgaaaatactgataaaaaataaaacggtttgcgggttagagagatcggtaattaatccgcggcgaaaaaagacataccagggggcgctaatcggttgttgtagtgtgctcatttgcggtgtactctggcggcgcatgctgcaccacgcaaaccataagagataagcgccgccgacgattctgataaggctaaaaatctcctcacactgcgtaattagcgttgcaagaccaaacaaacccaacccggaataaaatgcatcgcccagcgccacgcccagcccggtcagcacccctgcgcgtcgaccggaagccaggctggtttgtactaccacaaagagattggctcccggattaaaaaaagtaatcacgaacagtcctacggtcaggtaaacggcatgcaaaggatccatagtgatttcatccataaataagtgaactaactgcatcatatttctaccaaaaataatcgggtgcgagagagatcacaaagtgtcttatttccggttactggcgtttatgccctgactgaactaattattaatcaacccaataatgtgggtgggtgatagtgtgataacaactctggagccgtaatatgaaaataatctctaaaatgttagtcggtgcgttagcgttagccgttaccaatgtctatgccgctgaattgatgaccaaagcggaatttgaaaaagttgaaagccagtatgaaaaaataggtgatattagtaccagcaatgaaatgagcactgcagatgcaaaagaagatttgatcaaaaaagcggatgaaaaaggggctgatgtgttggtactgacctccggtcaaactgacaataagatccacggcacggcaaatatttataagaagaagtaattctgaatcctatgtaaacatctccgatgcgtaagtttatcggtgatcatctattgaaatttatgccggataaagcgttcgcgctgcattcggcagttcagcttttcagccgccgccagaacgtcgtccggctgatgcctaaataattcgccgctgctgttttatcgccattaaatttctccagtgcctgttgtggtgtcagtaagcgtggagcgggagttttcgcgctctcgcgcgccagttccggcagtagcagttgcataaactgcggcgttaaatccggcgtcggttccacacttaaaaacagcgccagtcgttccatcatattgcgcagttcacgaatattgcctggccagtcgtagtgcagcagcacagtttcacttgcctgtaacccctggcgtaatgcagcagaaaatggggcggagagcgccgccagagacactttcaaaaagctttccgccagcggaagaatatccgccacccgctcgcgcagtggtggcaattgcagacgcaaaatactcagccgataaaacagatcacggcgaaaacgtccttgctgcatatcttcttccagattgcagtgagtggcgctaatgacccgtacatctaccggaacaggctgatgcccgccgacgcgggtgacctctttttcttccagcacccgcagcagccgggtctgcaaaggtagcggcatttcgccaatctcatccagaaacagcgtaccgccgtgggcaatttcgaacagcccggcgcgacctccgcgtcggctgccggtaaacgccccttcctcatagccaaacagttctgcttccagcaggctttcggcaatcgccccgcagttgacggcaacaaacggatggctctttttgccctgtcgcgcatcgtggcgggcaaaatattcccgatgaatcgcctgggccgccagctctttgcccgtccccgtttccccctcaatcaacaccgccgcactggagcgggcatacagcaaaatagtctgccgtacttgttccatctgtggactttgaccgagcatatcgcccagcacgtaacgagtacgcagggcgttgcgggtggcatcgtgagtgttatggcgtaagctcatgcgcgtcatatccagcgcatcgctgaacgcctggcgcacggtggcggcggaatagataaaaattccggtcattccggcttcttctgccaaatcggtaatcagccctgcgccgaccaccgcttcggtgccgttagcttttagctcgttaatctgcccgcgtgcgtcttcctcggtaatgtagctacgttggtcgaggcgcaaattaaaggttttttgaaacgccaccagcgctggaatggtttcctgataggtgacaacgccgatagaagaggtgagttttccggcttttgccagtgcctgtaacacatcgtagccgctcggtttaatcaaaataactggcacactcaggcggcttttcaggtacgcgccgttagagccagccgcgatgatggcgtcacagcgttcgtttgccagtttcttgcggatgtaggtcactgctttttcaaagccaagctgaataggggtaatgttcgccaggtgatcaaactcgaggctgatatcgcgaaacagctcgaacaggcgcgttacagataccgtccagataaccggtttgtcgtcattaagccgtggtggatgtgccatagcgcaccgcaaagttaagaaaccgaatattgggtttagtcttgtttcataattgttgcaatgaaacgcggtgaaacattgcctgaaacgttaactgaaacgcatatttgcggattagttcatgactttatctctaacaaattgaaattaaacatttaattttattaaggcaattgtggcacaccccttgctttgtctttatcaacgcaaataacaagttgataacaaaggatgggctatgtctctacactctccaggtaaagcgtttcgcgctgcactgactaaagaaaatccattgcagattgttggcaccatcaacgctaatcatgcgctgttggcgcagcgtgccggatatcaggcaatttatctttctggcggtggcgtggcggcaggtagcctggggctgcccgatctcggtatttctacccttgatgatgtgctgaccgacattcgccgtatcaccgacgtttgtagcctgccgctgctggtggatgcggatatcggttttggttctagcgcctttaacgtggcgcgcaccgtgaaaagcatgattaaagccggtgcggcaggattgcatattgaagatcaggttggtgcgaaacgctgcggtcatcgtccgaataaagcgatcgtcagcaaagaagagatggtggatcggatccgcgcggcggtggatgcgaaaaccgatcctgattttgtgatcatggcgcgcaccgatgctctggcggtagaggggctggatgcggcgatcgagcgtgcgcaggcctatgttgaagcgggtgccgagatgttgttcccggaggcgattaccgaactcgccatgtaccgccagtttgccgatgcggtgcaggtgccgatcctcgccaacatcaccgaatttggtgccacgccgctgtttaccaccgacgaattacgcagcgcccatgtcgcaatggcgctgtacccacttagtgcgttccgcgccatgaaccgcgccgctgaacatgtctacaacgtcctgcgccaggaaggcacgcagaaaagcgtcatcgacaccatgcagacccgcaacgagctgtacgaaagcatcaactactaccagtacgaagagaagctcgacaacctgtttgcccgtagccaggtgaaataaaaaacgcccgttgattgtattcgacagccgatgcctgatgcgtcgctgacgcgacttatcaggcctacgaggtgcactgaactgtaggtcggataagacggatggcgtcgcatccgacaaccgatgcctgatgcgccgctgacgtgacttatcaggcctacggggtgcactgaactgtaggtcggataagacgcatagcgtcgcatccgacaaccgatgcctgatgcgccgctgacgcgacttatcaggcctacggggtgcactgaactgtaggtcggataagacgcatagcgtcgcatccgacaaccgatgcctgatgcgccgctgacgcgacttatcaggcctacggggtgaactgaactgtaggtcggataagacgcatagcgtcgcatccgacaacaatctcgaccctacaaatgataacaatgacgaggacaacatgagcgacacaacgatcctgcaaaacagtacccatgtcattaaaccgaaaaaatctgtggcactttctggcgttccggcgggcaatacggcgctctgcaccgtgggtaaaagtggcaatgacctgcattaccgcggctacgatattcttgatctggcgaaacattgcgaatttgaagaagtggcgcatctgctgatccacggcaaactgccgacccgtgacgaactcgccgcttacaaaacgaaactgaaagccctgcgcggtttaccggctaacgtgcgtaccgtgctggaagccttaccggcggcgagccacccgatggatgttatgcgcaccggtgtttccgcgctcggctgcacgctgccagaaaaagaggggcataccgtctctggcgcgcgggatattgccgacaaactgctggcgagccttagcagcattctcctttattggtatcactacagccacaacggcgaacgcatccaaccggaaaccgatgacgactccatcggcggtcacttcctgcatctgctgcacggcgaaaagccaagccaaagctgggaaaaggcgatgcatatcagcctggtgctgtacgccgaacacgagtttaacgcctccacctttaccagtcgggtgattgcgggcaccggctctgatatgtattccgcgattattggcgcgattggcgcactgcgcgggccaaaacacggcggggcgaatgaagtgagcctggagatccagcaacgctacgaaacgccggacgaagccgaagcagatatccgcaagcgcgtggaaaacaaagaagtggtcattggttttggtcatccggtttacaccatcgctgacccgcgccaccaggtgattaaacgtgtggcgaagcagctcagccaggaaggcggcagcctgaagatgtacaacatcgccgatcgcctggaaacggtgatgtgggagagcaaaaagatgttccccaatctcgactggttctctgctgtttcctacaacatgatgggcgttcccaccgagatgttcacaccactgtttgttatcgcccgcgtcaccggctgggcggcgcacattatcgaacaacgtcaggacaacaaaattatccgtccttccgccaattatgttggaccggaagaccgcccgtttgtcgcgctggataagcgccagtaaacctctacgaataacaataaggaaacgtacccaatgagtgctcaaatcaacaacatccgcccggaatttgatcgtgaaatcgttgatatcgtcgattacgtcatgaactacgaaatcagctctaaagtggcctacgacaccgcacattactgcctgctcgacacgctcggctgcggtctggaagctctcgaatacccggcctgtaaaaaactgctggggccaattgttcccggcaccgtcgtacccaacggcgtgcgcgtccccggaactcagttccagctcgaccccgtccaggcggcatttaacatcggcgcgatgatccgctggctcgatttcaacgatacctggctggcggcggagtggggccatccttccgacaacctcggcggcattctggcaacggcggactggcttagccgcaacgcggtcgccagcggcaaagcgccgttgaccatgaaacaggtgctgaccgcaatgatcaaagcccatgaaattcagggctgcatcgcgctggaaaactcctttaaccgcgtcggcctcgaccacgttctgttagtgaaagtggcttccaccgccgtggtcgccgaaatgctcggcctgacccgcgaggaaattctcaacgccgttagcctggcgtgggtggacggtcagagcctgcgcacctatcgccatgcgccgaacaccggcacgcgtaaatcctgggcggcgggcgatgccacttcccgcgcggtacgtctggcactgatggcgaaaacgggcgaaatgggttacccgagtgccctgactgcgccggtgtggggcttctacgacgtctcctttaaaggtgaaagcttccgcttccagcgcccgtacggttcctacgttatggaaaatgtgctgttcaaaatctccttcccggcggagttccactcccagacggcagttgaagcagcgatgacgctctatgaacagatgcaggcagcaggcaaaacggcggcggatatcgaaaaagtgaccattcgcacccacgaagcctgtattcgcatcatcgacaaaaaagggccgctcaataacccggcagaccgcgatcactgcattcagtacatggtggcgatcccgctgctattcgggcgcttaacggcggcagattacgaggacaacgttgcgcaagataaacgcattgacgccctgcgcgagaagatcaattgctttgaagatccggcatttaccgctgactaccacgacccggaaaaacgcgccatcgccaatgccattacccttgagttcaccgacggcacacgatttgaagaagtggtggtggagtaccccattggtcatgctcgccgccgtcaggatggtattccgaaactggtcgataaattcaaaatcaatctcgcgcgccagttcccgactcgccaacagcagcgcattctggaggtttctctcgacagagctcgcctggaacagatgccggtcaatgagtatctcgacctgtacgtcatttaagtaaacggcggtaaggcgtaagttcaacaggagagcattatgtcttttagcgaattttatcagcgtagcattaacgaaccggagcagttctgggccgagcaggcccggcgtattgactggcagacgccctttacgcaaacgctcgatcacagcaatccgccgtttgcccgttggttttgtgaaggccgaaccaacttgtgccacaacgccatcgaccgctggctggagaaacagccagaggcgctggcgctgattgccgtctctagcgaaacagaagaagagcgcacctttacctttcgtcagctgcatgacgaagtgaacgcggtggccagtatgttgcgtagtttgggtgtgcagcgcggcgatcgggtgctggtgtatatgccgatgattgccgaagcgcatattactctgctggcctgcgcgcgcattggcgctattcacagcgtggtgtttggtggatttgccagccacagcgtggcggcgcgaattgatgacgctaaaccggtgctgattgtcagcgctgatgccggagcgcgcggtggcaaaatcattccctataaaaaattgctcgacgatgcgataagtcaggcgcagcaccagccacgccatgttttgctggtggatcgcgggctggcgaaaatggcgcgcgtcagcgggcgggatgtcgatttcgcgagcttgcgccatcaacacatcggcgcgcgggtaccggtggcgtggctggaatccaacgaaacctcctgcattctctacacttccggcacgaccggcaaacctaaaggcgtgcagcgtgacgtcggcggatatgcggtggcgctggcgaccagcatggacaccatttttggcggcaaagcgggcagcgtgttcttttgcgcaagcgatatcggctgggtggtggggcatagctatatcgtttacgcgccgctgctggcggggatggcgactatcgtttacgaaggattgccgacctggccggactgcggcgtgtggtggacaatcgtcgagaaatatcaggttagccggatgttcagtgcgccgaccgccattcgcgtgctgaaaaaattccctaccgctgaaattcgcaaacacgatctcagcagcctggaagtgctctatctggctggagaaccgctggacgagccgaccgccagttgggtgagcaatacgctggatgtgccggtcatcgacaactactggcagaccgaatccggctggccgattatggcgattgctcgcggtctggacgacaggccgacgcgtctgggaagccccggtgtgccgatgtatggctataacgtgcagttgcttaatgaagtcaccggcgaaccgtgtggcgtcaacgagaaagggatgctggtggtggaagggccgctgccgccggggtgtattcagaccatctggggcgacgacggccgctttgtgaagacttactggagcctgttttcccgcccggtgtacgccacctttgactggggcatccgtgacgctgacggttatcactttattctcgggcgcactgacgatgtaattaacgttgccgggcatcggctggggacgcgcgagattgaagagagtatctccagccatccgggcgttgccgaagtggcggtggttggggtgaaagatgcgctgaaagggcaggtggcggtggcgtttgtcattccgaaagagagcgacagtctggaagatcgtgatgtggcgcacagccaagagaaggcgattatggcgctggtggacagccagattggcaactttggccgcccggcgcacgtctggtttgtcagccaattgccaaaaacgcgatccggaaaaatgctgcgccgcacgatccaggcgatttgcgaaggacgcgatcctggagatctgacgaccattgatgatcctgcgagcttggatcagatccgccaggcgatggaagagtaagttattgtcggatgcgtcgcgcggtgcatccggcactgtgtgccgatgcctgatgcgacgctgacgcgttttatcatgcctacggacctgaaccgtaggtcggataaggcgctcgcgtcgcatccgacaccatgctcagatgcctgatgcgacgctgacgcgtcttatcaggcctacccactgtttttacaccgataatttttcccccacctttttgcactcattcatataaaaaatatatttccccacgaaaacgattgctttttatcttcagatgaatagaatgcggcggattttttgggtttcaaacagcaaaaagggggaatttcgtgagccaagataacaactttagccaggggccagtcccgcagagcgcgcggaaaggggtattggcattgacgttcgtcatgctgggattaaccttcttttccgccagtatgtggaccggcggcactctcggaaccggtcttagctatcatgatttcttcctcgcagttctcatcggtaatcttctcctcggtatttacactagttttctcggttacattggcgcaaaaaccggcctgaccactcatcttcttgctcgcttcagctttggtgttaaaggcagttggctgcctagtctgctactgggcggaactcaggttggctggtttggcgtcggtgtggcgatgtttgccattccggtgggtaaggcaaccgggctggatattaatttgctgattgccgtttccggtttactgatgaccgtcaccgtcttttttggcattagcgcgctgacggttcttagcgtgattgcggttccggctatcgcctgcctgggcggttattccgtgtggctggctgttaacggcatgggcggcctggacgcattaaaagcggtcgttcccgcacaaccgttagatttcaatgtcgcgctggcgctggttgtggggagttttatcagtgcgggtacgctcaccgctgactttgtccggtttggtcgcaatgccaaactggcggtgctggtggcgatggtggcctttttcctcggcaacagcttgatgtttattttcggtgcagcgggcgctgcggcactgggcatggcggatatctctgatgtgatgattgctcagggcctgctgctgcctgcgattgtggtgctggggctgaatatctggaccaccaacgataacgcactctatgcgagcggtttaggtttcgccaacattaccgggatgagcagcaaaacccttagcgtaatcaacggtattatcggtacggtctgcgcattatggctgtataacaattttgtcggctggttgaccttccttagcgcagctattcctccagtgggtggcgtgatcatcgccgactatctgatgaaccgtcgccgctatgagcactttgcgaccacgcgtatgatgagtgtcaattgggtggcgattctggcggtcgccttggggattgctgcaggccactggttaccgggaattgttccggtcaacgcggtattaggtggcgcgctgagctatctgatccttaacccgattttgaatcgtaaaacgacagcagcaatgacgcatgtggaggctaacagtgtcgaataactaagacgcatgtggaggctaacagtgagcaataacgctttacaaacaattattaacgcccggttaccaggcgaagaggggctgtggcagattcatctgcaggacggaaaaatcagcgccattgatgcgcaatccggcgtgatgcccataactgaaaacagcctggatgccgaacaaggtttagttataccgccgtttgtggagccacatattcacctggacaccacgcaaaccgccggacaaccgaactggaatcagtccggcacgctgtttgaaggcattgaacgctgggccgagcgcaaagcgttattaacccatgacgatgtgaaacaacgcgcatggcaaacgctgaaatggcagattgccaacggcattcagcatgtgcgtacccatgtcgatgttagcgatgcaacgctaactgcgctgaaagcaatgctggaagtgaagcaggaagtcgcgccgtggattgatctgcaaatcgtcgccttccctcaggaagggattttgagctatcccaacggtgaagcgttgctggaagaggcgttacgcttaggggcagatgtagtgggggcgattccgcattttgaatttacccgtgaatacggcgtggagagcctgcataaaaccttcgccctggcgcaaaaatacgaccgtctcatcgacgttcactgtgatgagatcgatgacgagcagagccgctttgtcgaaaccgttgctgccctggcgcaccatgaaggcatgggcgcgcgagtcaccgccagccacaccacggcaatgcactcctataacggggcgtataccagtcgcctgttccgcttgctgaaaatgtccggtattaactttgtcgccaacccgctggtcaatattcatctgcaaggacgtttcgatacgtatccaaaacgtcgcggcatcacgcgcgttaaagagatgctggagtccggcattaacgtctgctttggtcacgatgatgtcttcgatccgtggtatccgctgggaacggcgaatatgctgcaagtgctgcatatggggctgcatgtttgccagttgatgggctacgggcagattaacgatggcctgaatttaatcacccaccacagcgcaaggacgttgaatttgcaggattacggcattgccgccggaaacagcgccaacctgattatcctgccggctgaaaatgggtttgatgcgctgcgccgtcaggttccggtacgttatagcgtacgtggcggcaaggtgattgccagcacacaaccggcacaaaccaccgtatatctggagcagccagaagccatcgattacaaacgttgaacgactgggttacagcgagcttagtttatgccggatgcggcgtgaacgccttatccggcctacgtagagcactgaactcgtaggcctgataagcgtagcgcatcaggcaattccagccgctgatctgtgtcagcggctaccgtgattcattcccgccaacaaccgcgcattcctccaacgccatgtgcaaaaatgccttcgcagcggctgtctgccagctgtagtttatgccggatgcggcgtgaacgccttatccggcctacgtagagcactgaactcgtaggcctgataagcgtagcgcatcaggcaattccagccgcagacctgtgtcagcggttaccgactttcatttccgccaacaaccgcgcatttatccaacgccatgtgcaaaaatgccttcgcggcggctgtctgccagctatttttccgccgcaacaaaaccgccgttctctccagtagtggcggggcaagagaaatagctttaagcccgtcatgttgtgtggcaatcgctgctggtaacaatgtggaaagggaagtgcggcgaatcagctccagaaccgcgctaatactgttcgcctcaatgaccacctgtggatgtagccccgctttctcgcagtagtggtcaatttgctctctggtggcaaattccgcgctgagcaggaccagtttttcatcatgcaagcgactcaacgccacctgttcatggacggccagcggatgatgttgcgccacgactaacgctaaactttctgtcagtaaaggaattgcctccagctccgggctatgcacaggcgcgaaggcaatcccaacgtccaactcgtcgcggcaaagcatatcctcgattttctcctggctcatttcctgtagctggagcgtgatgctgggatagcgcgcatagaaatccgccattaaggggccgataaagtagctcgtaaaggtgggggtgacggcgatacgcaggcttcctcgcgtcagatcggcaacatcatgaatcgcccgtttacccgcccccagttcctgtaacgcccggctggcgtactgtcgccagacttctcctgcatcagtgagacgaatcgttcgcccgctacggtcaaacagcggcacgcctaaactctcctctaactggcgaatctgctgggaaagcgcaggttgggagacgtgcaacgcactggcggcacgggtgaagctgccatgttcagccacggcaagaaaataattgatatgtcgagagagcattcgcaacctataagtaaatccaatggaactcatcataaatgagacttttaccttatgacaatcggcgagtagtctgcctctcattccagagacagacagaggttaacggtgaaagagattattgatggattccttaaattccagcgcgaggcatttccgaagcgggaagccttgtttaaacagctggcgacacagcaaagcccgcgcacactttttatctcctgctccgacagccgtctggtccctgagctggtgacgcaacgtgagcctggcgatctgttcgttattcgcaacgcgggcaatatcgtcccttcctacgggccggaacccggtggcgtttctgctagcgtggagtatgccgtcgctgcgcttcgggtatctgacattgtgatttgtggtcattccaactgtggcgcgatgaccgccattgccagctgtcagtgcatggaccatatgcctgccgtctcccactggctgcgttatgccgatagtgcccgcgtcgttaatgaggcgcgcccgcattccgatttaccgagtaaagctgcggcgatggtacgtgaaaacgtcattgctcagttggctaatttgcaaactcatccaagcgtgcgcctggcgctcgaagaggggcggatcgccctgcacggctgggtctacgacattgaaagcggcagcatcgcagcttttgacggcgcaacccgccagtttgtgccactggccgctaatcctcgcgtttgtgccataccgctacgccaaccgaccgcagcgtaaccttatttttaaaccatcaggagttccaccatgattcagagtcaaattaaccgcaatattcgtcttgatcttgccgatgccattttgctcagcaaagctaaaaaagatctcagttttgccgagattgccgacggcaccggtctggcagaagcctttgtaaccgcggctttgctgggtcagcaggcgcttcctgccgacgccgcccgcctggtcggggcgaagctggatctcgacgaagactccattctactgttgcagatgattccactgcgtggctgcattgatgaccgtattccaactgacccaacgatgtatcgtttctatgaaatgttgcaggtgtacggtacaaccctgaaagcgttggttcatgagaaatttggcgatggcattattagcgcgattaacttcaaactcgacgttaagaaagtggcggacccggaaggtggcgaacgtgcggtcatcaccttagatggtaaacatctgccgaccaaaccgttctgacagccatgcgcaaccatcaaaagacgttcacgatgctgctggtactggtgctgattggtcttaatatgcgaccactgctcacctccgtcgggccactgctaccgcaattgcgccaggcgagcggaatgagctttagcgtggctgccctgttgaccgctctgccggtggttaccatgggcgggctggcgctggccggaagctggcttcatcagcatgtcagcgaacgtcgcagtgtcgccatcagtctgttgctgattgccgtcggtgcattgatgcgtgagctttacccgcaaagtgcgctgctgcttagcagcgcactgcttggtggggtggggatcggcatcattcaggcggtgatgcctagcgtgattaaacggcggtttcagcagcgcacgccactggtgatggggctgtggtccgcggctctgatgggcggcggtgggcttggtgccgccataacgccctggttagttcaacatagcgaaacctggtatcaaacactcgcctggtgggcgctgcctgccgttgttgcgctctttgcctggtggtggcaaagcgcccgcgaggtcgcctcttcccacaagacaacaaccactccggttcgcgtggtattcactccccgcgcgtggacgctgggtgtttacttcggtctgattaacggcggttacgccagcctgattgcctggttacccgctttctatattgagattggtgccagcgcgcagtacagcggttccttactggcattgatgacgcttgggcaagccgcaggagctttgctgatgcctgctatggctcgccatcaggatcggcgcaaactgttaatgctggcgctggtgttacaactggtggggttctgcggctttatctggctgccgatgcaattgccggtattgtgggcgatggtgtgtgggttaggtctgggcggcgcgtttccgctctgtttgctgctggcgctcgatcactctgtgcaaccggctattgctggcaagctggtggcgtttatgcagggaatcggttttatcatcgccgggcttgccccgtggttttctggcgtgctgcgtagtatcagcggcaattacctgatggactgggcatttcatgcgctgtgcgtcgttgggctgatgatcataaccctgcgttttgcaccagtacgttttccgcagctgtgggtcaaagaggcatgatgcgacgcttgttcctgcgctttgttcatgccggatgcggctaatgtagatcgctgaacttgtaggcctgataagcgcagcgtatcaggcaatttttataatttaaacactgctttcaactttataatctttgaaataatagtgcttatcccggtcgtttatttcgcgaataacccgacaaggaacgccagccgccacgacgtttggtggaatgtcttttgtgacgatactacccgcgccaataacagaattatccccgatggtgacgcctggattaataaccacatgacttccgatccagacgttattgccaatcgttatcggaaaagagtacatctcgccgttttttctcaattcatggtgtacagggtgtcccgtaacggaaagagtaacgttgggtgcaatcagtacgttatcaccgattgttaccgtgtagtcatcgacaatggttaaattgaaatttgcataaaaattgcggcctatatggatgttggaaccgtaagagaaatagacaggcggttctacccaggcgttttcccctaccgtggcaaacatttctttaatcaggctttctcttttttcaacttcacttggatggctgtgattaaactcatacattaacgttttcccacgaagtcttttttccggtaagccttcgcacatatcggtaaatagcttgcctgctcttattctttcggtcattggcatgttcaatgcgatcactccgttatgatatgttggtcggataaggcgctcgcgccgcatccgacattgattgcttaagcgacttcattcacctgacgacgcagcagggaaagcgggccggggccgctaagcgtgaacacggaaattaaggtgaagcccagcgccaccagacccagcaccagataagcgccctggaaaccgatgctttcatacatattgcccgccagtacagacataaaaatcatcgccagttgcttaaagaagcagaaacagaccagataaatcgtcgcactaaaacgcacttcaaactggctggtaatatatttaaagcagcccaccagcaggaacggtacttcaaacatatgcagcgttttcagaataaccacttccagcgcactggtggcgaagctactgccaataatacgtacagacataatagtgccagccagcagcagggcgtttttcccaccgatgcgattaatgatcagtggcgcaaagaacataatgctggcgttaagtaattcgcccattgtcgttacgtagccaaatacccgcgtaccctgttcaccggtagcaaagaagctagtaaagaaattagcaaactgttggtcaaaaacatcgtaggtgcaggaaacgccaataacatacagactcaaaaaccacagttttggctgtctgaacagttccagtgccagcttaaggctaaatgcgctatggttggcacctaccgcattggcaaccgtggcagaagagggcgcatccgttttggcgaaaaagagtaaaacggcgaggatgagtgcacagccagagcccagccagaaaacaaactgattattgatggtgaacatgatgccgacaatgctggcacacagcgcccagccaacacagccaaacatccgcgcgcgaccaaattcgaaattactgcgacggctgactttctcaataaatgcctctactgctggcgcaccggcgttaaaacaaaagcctagataaataccaccaacaatgcttcctactaaaatgttgtattgtaacagtggcccgaagataaaaataaagaacggcgcaaacatcactaacatgccggtaataatccacagcaggtatttgcgcagcccgagtttgtcagaaagcagaccaaacagcggttggaataataggctgaacagagaaatagcggcaaaaataatacccgtatcacttttgctgatatggttgatgtcatgtagccaaatcgggaaaaacgggaagtaggctcccatgataaaaaagtaaaagaaaaagaataaaccgaacatccaaaagtttgtgttttttaaatagtacataatggatttccttacgcgaaatacgggcagacatggcctgcccggttattattatttttgacaccagaccaactggtaatggtagcgaccggcgctcagctggaattccgcgcttacactcgggctccaggagtcgtcgccaccaatccccatatggaaaccgtcgatattcagccatgtgccttcttccgcgtgcagcagatggcgatggctggtttccatcagttgctgttgactgtagcggctgatgttgaactggaagtcgccgcgccactggtgtgggccataattcaattcgcgcgtcccgcagcgcagaccgttttcgctcgggaagacgtacggggtatacatgtcactcaatggcagatcccagcggtcaaaacaggcggcagtaaggcggtcgggatagttttcttgcggccctaatccgagccagtttacccgctctgctacctgcgccagctggcagttcaggccaatccgcgccggatgcggtgtatcgctcgccacttcaacatcaacggtaatcgccatttgaccactaccatcaatccggtaggttttccggctgataaataaggttttcccctgatgctgccacgcgtgagcggtcgtaatcagcaccgcatcagcaagtgtatctgccgtgcactgcaacaacgctgcttcggcctggtaatggcccgccgccttccagcgttcgacccaggcgttagggtcaatgcgggtcgcttcacttacgccaatgtcgttatccagcggtgcacgggtgaactgatcgcgcagcggcgtcagcagttgttttttatcgccaatccacatctgactaagaaagccactctggcggttaaattgccaacgcttattacccagctcgatgcaaaaatccatttcgctggtggtcagatgcgggatggcgtgggacgcggcggggagcgtcacactgaggttttccgccagacgccactgctgccaggcgctgatgtgcccggcttcactccatgcggtcgcgttcggttgcactacgcgtactgtgagccagagttgcccggcgctctccggctgcggtagttcaggcagttcaatcaactgtttaccttgtggagcgacatccagaggcacttcaccgcttgccagcggcttaccatccagcgccaccatccagtgcaggagctcgttatcgctatgacggaacaggtattcgctggtcacttcgatggtttgcccggataaacggaactggaaaaactgctgctggtgttttgcttccgtcagcgctggatgcggcgtgcggtcggcaaagaccagaccgttcatacagaactggcgatcgttcggcgtatcgccaaaatcaccgccgtaagcgctccacgggttgccgttttcatcatatttaatcaggctctgatccacccagtcccagacgaagccgccctgtaaacggggatactgacgaaacgcctgccagtatttagcgaaaccgccaagactgttacccatcgcgtgggcgtattcgcaaaggatcagcgggcgcgtctctccaggtaggctaagccattttttgatggaccatttcggcacagccgggaagggctggtcttcatccacgcgcgcgtacatcgggcaaataatatcggtggccgtggtgtcggctccgccgccttcatactgcaccgggcgggaaggatcgacagatttgatccagcgatacagcgcgtcgtgattagcgccgtggccactttcattccccaggctccagatgatcacactcgggtgattacgatcgcgctgcaccattcgcgttacgcgttcgctcatcgccggtagccagcgcggatcatcggtcagacgattcattggcaccatgccgtgggtttcaatattggcttcatccaccacatacaggccgtagcggtcgcacagcgtgtaccacagcggatggttcggataatggctacagcgcacggcgttaaagttgttctgcttcatcagcaggatatcctgcaccatcgtctgctcatccatgacctgaccatgcagaggatgatgctcgtgacggttaacgcctcgaatcagcaacggcttgccgttcagcagcagcagaccattttcaatccgcacctcgcggaaaccgacatcgcaggcttctgcttcaatcagcgtgccgtcggcggtgtgcagttcaaccaccgcacgatagagattcgggatttcggcgctccacagtttcgggttttcgacgttcagacgtagtgtgacgcgatcggcataaccaccacgctcatcgataatttcaccgccgaaaggcgcggtgccgctggcgacctgcgtttcaccctgccataaagaaactgttacccgtaggtagtcacgcaactcgccgcacatctgaacttcagcctccagtacagcgcggctgaaatcatcattaaagcgagtggcaacatggaaatcgctgatttgtgtagtcggtttatgcagcaagctgacgtcacggaaaatgccgctcatccgccacatatcctgatcttccagataactgccgtcactccagcgcagcaccatcaccgcgaggcggttttctccggcgcgtaaaaatgcgctcaggtcaaattcagacggcaaacgactgtcctggccgtaaccgacccagcgcccgttgcaccacagatgaaacgcgctgttaacgccatcaaaaataattcgcgtctggccttcctgtagccagctttcatcaacattaaatgtgaggctgtaacaacccgtcggattctccgtgggaacaaacggcggattgaccgtaatgggataggtcacgttggtgtagatgggcgcatcgtaaccgtgcatctgccagttactggggacgacgacagtatcggcctcaggaagatcgcactccagccagctttccggcaccgcttctggtgccggaaaccaggcaaagcgccattcgccattcaggctgcgcaactgttgggaagggcgatcggtgcgggcctcttcgctattacgccagctggcgaaagggggatgtgctgcaaggcgattaagttgggtaacgccagggttttcccagtcacgacgttgtaaaacgacggccagactatccgtaatcatggtcatagctgtttcctgtgtgaaattgttatccgctcacaattccacacaacatacgagccggaagcataaagtgtaaagcctggggtgcctaatgagtgagctaactcacattaattgcgttgcgctcactgcccgctttccagtcgggaaacctgtcgtgccagctgcattaaactatcggccaacgcgcggggagaggcggtttgcgtattgggcgccagggtggtttttcttttcaccagactgacgggcaacagctgattgcccttcaccgcctggccctgagagagttgcagcaagcggtccacgctggtttgccccagcaggcgaaaatcctgtttgatggtggttaacggcgggatataacaactgctgtcttcggtatcgtcgtatcccactacgctgatatccgcaccaacgcgcagcccggactcggtaatggcgcgcattgcgcccagcgccatctgatcgttggcaaccagcatcgcagtgggaacgatgccctcattcagcatttgcatggtttgttgaaaaccggacatggcactccagtcgccttcccgttccgctatcggctgaatttgattgcgagtgagatatttatgccagccagccagacgcagacgcgcgctgacagaacttaatgggcccgctaacagcgcgatttgctggtgacccaatgcgaccagatgctccacgcccagtcgcgtaccgtcttcatgggagaaaataatactgttgatgggtgtctggtcagagacatcaagaaataacgccggaacattagtgcaggcagcttccacagcaatggcatcctggtcatccagcggatagttaatgatcagcccactgacgcgttgcgcgagaagattgtgcaccgccgctttacaggcttcgacgccgcttcgttctaccatgctcaccaccacgctggcacccagttgatcggcgcgagatttaatcgccgcgacaatttggctcggcgcgtgcagggccagactggaggtggcaacgccaatcagcaagctctgtttgcccgccagttgttgtgccacgcggttgggaatgtaattcagctccgccatcgccgcttccactttttcccgcgttttcgcagaaacgtggctggcctggttcaccacgcgggaaacggtctgataagagacaccggcatactctgcgacatcgtataacgttactggtttcacattcaccaccctgaattgactctcttccgggcgctatcatgccataccgcgaaaggttttgcgccattcgatggtgtcaacgtaaatgcatgccgcttcgccttccggccaccagaatagcctggctttcaaccccttcttcgatctgttttgctacccgttgtagcgccggaagatgcttttccgctgcctgttcaatggtcattgcgctcgccatatacaccagattcagacagccaatcacccgttgttcactgcgcagcggtacggcgatagaggcgatcttctcctcctgatcccagccgcggtagttctgtccgtaaccctctttgcgcgcgcgcgccagaatggcttccagctttaacggttcccgtgccagttgatagtcatcaccggggcgggaggctaacatttcgattaattccttgcggtcttgttccgggcaaaaggccagccaggtcaggccgctggcggttttcagaagcggcaaacgtcgcccgaccattgcccggtgaaaggataagcggctgaaacggtgagtggtttcgcgtaccaccattgcatcaacatccagcgtggacacatctgtcggccataccacttcgcgcaacagatcgcccagcagtggggccgccagtgcagaaatccactgttcgtcacgaaatccttcgcttaattgccgcactttgatggtcagtcgaaaactatcatcggaggggctacggcggacatatccctcttcctgcagcgtctccagcagtcgccgcacagtggtgcgatgcaggccgctgagttccgccagcagcccgacgctggcaccgccatcaagtttatttaacatatttaataacattagaccgcgggttaagccgcgcacggttttgtattccgtctgctcattgttctgcatattaatactcatttctatagttaaaacaacgtggtgcacctggtgcacattcgggcatgttttgattgtagcgctaaacacccttcctatactgagcgcacaataaaaaatcatttacatgtttttaacaaaataagttgcgctgtactgtgcgcgcaacgacattttgtccgagtcgtgaggtactgaaatggcaatacaacaccctgacatccagcctgctgttaaccatagcgttcaggtggcgatcgctggtgccggcccggttgggctgatgatggcgaactatctcggccagatgggcattgacgtgctggtggtggagaaactcgataagttgatcgactacccgcgtgcgattggtattgatgacgaggcgctgcgcaccatgcagagcgtcggcctggtcgatgatgttctgccgcacactacgccgtggcacgcgatgcgttttctcaccccgaaaggccgctgttttgctgatattcagccaatgaccgatgaatttggctggccgcgccgtaacgcctttattcagccgcaggtcgatgcggtgatgctggaaggggtgagccgttttccgaatgtgcgctgcttgttttcccgcgagctggaggccttcagtcagcaagatgacgaagtgaccttgcacctgaaaacggcagaagggcagcgggaaatagtcaaagcccagtggctggtagcctgtgacggtggagcaagttttgtccgtcgcactctgaatgtgccgtttgaaggtaaaactgcgccaaatcagtggattgtggtagatatcgccaacgatccgttaagtacgccgcatatctatttgtgttgcgatccggtgcgcccgtatgtttctgccgcgctgcctcatgcggtacgtcgctttgaatttatggtgatgccgggagaaaccgaagagcagctgcgtgagccgcaaaatatgcgcaagctgttaagcaaagtgctgcctaatccggacaatgttgaattgattcgccagcgtgtctacacccacaacgcgcgactggcgcaacgtttccgtattgatcgcgtactgctggcgggcgatgccgcgcacatcatgccggtatggcaggggcagggctataacagtggtatgcgcgacgcctttaacctcgcatggaaactggcgttggttatccaggggaaagcccgcgatgcgctgctcgatacctatcaacaagaacgtcgcgatcacgccaaagcgatgattgacctgtccgtgacggcgggcaacgtgctggctccgccgaaacgctggcagggtacgttacgtgacggcgtttcctggctgttgaattatctgccgccagtaaaacgctacttcctcgaaatgcgcttcaagccgatgccgcaatattacggcggtgcgctgatgcgtgagggcgaagcgaagcactctccggtcggcaagatgtttattcagccgaaagtcacgctggaaaacggcgacgtgacgctgctcgataacgcgatcggcgcgaacttcgcggtaattggctggggatgcaatccactgtgggggatgagcgacgagcaaatccagcagtggcgcgcgttgggcacacgcttcattcaggtggtgccggaagtgcaaattcataccgcacaggataaccacgacggcgtactacgcgtgggcgatacgcaaggtcgcctgcgtagctggttcgcgcaacacaatgctagcctggtggtgatgcgcccggatcgctttgttgccgccaccgccattccgcaaaccctgggcaagaccctgaataaactggcgagcgtgatgacgctgacccgccctgatgccgacgtttctgtcgaaaaggtagcctgatatgcacgcttatcttcactgtctttcccacagcccgctggtggggtatgtcgacccggcgcaagaggtgctcgatgaggtcaatggcgtgattgccagcgcccgcgagcgtattgcggcattctcccctgaactggtggtgctgtttgcgccagatcactacaacggctttttctatgacgtgatgccaccgttctgtttaggcgttggagcgacggcaattggtgatttcggcagtgcggcaggagagctgcccgtgcctgtggagctggcggaggcctgtgcgcatgccgtcatgaagagcgggatcgatcttgccgtttcttactgtatgcaggtggaccacgggttcgcccagccgctggagttcctgctcggtgggctggataaggtgccagttctgcctgtgttcatcaacggtgtcgccacgccgctgcccggtttccagcgtacccgcatgttgggtgaagccattggacgtttcaccagcactctcaataaacgcgtgctgttcctgggttccggtgggctttcccatcagccgccggtgcccgaactggcgaaagccgatgcccatatgcgcgaccgtctgttggggagcgggaaagatttacccgccagtgagcgcgaattgcgtcagcaacgggtgattagcgccgctgagaagtttgttgaggatcagagaacgctgcatccgctcaacccgatttgggataaccagttcatgactttgctggagcagggacgcatacaggaactggatgccgtcagtaacgaagagctttccgccattgccggaaagagcacacatgaaatcaaaacctgggtcgccgcttttgccgctatttctgcgtttggcaactggcgtagcgaagggcgttattaccgcccaatcccggagtggattgccggatttggcagcttaagcgccagaacagagaactgaatatgcaggagaagatgatgagttatcagccacaaaccgaagccgccaccagccgttttctgaatgtagaagaagcgggtaaaacgctgcgcatccattttaatgactgcggacaaggcgacgaaaccgttgtcctgctgcatggttccggcccgggtgctactggctgggcgaacttcagccgcaatatcgatccgctggtagaggcgggctatcgggtgatcctgctggattgtccgggttggggcaagagcgatagcgtcgttaatagtggtagccgaagcgatcttaatgcacgaatcctgaaaagcgtggtggatcaactggatatcgccaaaatccacctgctgggcaacagcatggggggccatagttctgtggcgttcacccttaaatggccggagcgcgtcggcaaactggtgctgatgggcggcggtacgggcggcatgagtttgtttacgccgatgccaaccgaaggtattaagcgactgaatcagctttatcgtcagccgactatcgaaaacctgaagctgatgatggatatcttcgtttttgataccagcgatttgaccgacgccctgtttgaagcgcgcctgaataatatgctgagccgccgcgatcacctggaaaacttcgttaagagcctggaagctaatccgaaacagttcccggattttggcccacgtctggcggaaatcaaagcgcaaaccctgattgtctgggggcgcaacgaccgctttgtgccgatggatgcgggtctgcgtctgctgtccggcattgccggttctgaactgcatatcttccgcgactgtggtcactgggcgcagtgggaacatgccgacgctttcaatcaactggtgctgaatttcctcgcacgcccttaaggaatggtcatgacgaagcatactcttgagcaactggcggcggatttacgccgcgccgcagagcagggcgaagcgattgcaccgctgcgcgatctgattggtatcgataacgctgaagcggcttacgccattcagcacataaatgtgcaacatgacgttgcgcaggggcgtcgcgtggtagggcgtaaagtgggcctgacacatccgaaagtgcaacaacaactgggcgttgatcaaccggattttgggacgttatttgccgacatgtgttatggcgataacgaaatcattcctttttcccgtgttctgcaaccccgcattgaagcggagatcgcactggtgttgaaccgcgatttgcccgcaaccgatatcaccttcgacgaattgtataacgccattgaatgggtacttccggcgctggaagtggtggggagccgcattcgcgactggagcattcagtttgtcgataccgtggcagataacgcctcctgtggggtgtatgtcatcggcggtccggcgcaacgtccggcggggttagacctgaaaaactgcgccatgaagatgacgcgtaataacgaagaggtttctagcgggcgcggcagcgaatgcctgggacatccgcttaatgcggccgtctggctggcacgcaaaatggccagtctgggtgaaccgctgcgcaccggagatatcattcttaccggggcattaggtccgatggtggcggtgaatgcgggcgatcgttttgaagcccatattgaaggcataggtagtgttgctgcgacatttagtagcgcagccccaaaaggaagtctgagttgagctaagccccaaaaggaagtctgtcatgagtaagcgtaaagtcgccattatcggttctggcaacattggtaccgatctgatgattaaaattttgcgtcacggtcagcatctggagatggcggtgatggttggcattgatcctcagtccgacggtctggcgcgcgccagacgtatgggcgtcgccaccacccatgaaggggtgatcggactgatgaacatgcctgaatttgctgatatcgacattgtatttgatgcgaccagcgccggtgctcatgtgaaaaacgatgccgctttacgcgaagcgaaaccggatattcgcttaattgacctgacgcctgctgccatcggcccttactgcgtgccggtggttaacctcgaggcgaacgtcgatcaactgaacgtcaacatggtcacctgcggcggccaggccaccattccaatggtggcggcagttagtcgcgtggcgcgtgttcattacgccgaaattatcgcttctatcgccagtaaatctgccggacctggcacgcgtgccaatatcgatgaatttacggaaaccacttcccgagccattgaagtggtgggcggcgcggcaaaagggaaggcgattattgtgcttaacccagcagagccaccgttgatgatgcgtgacacggtgtatgtattgagcgacgaagctagtcaagatgatatcgaagccagtatcaatgaaatggctgaggcggtgcaggcttacgtaccgggttatcgcctgaaacagcgcgtgcagtttgaagttatcccgcaggataaaccggtcaatttaccgggcgtggggcaattctccggactgaaaacagcggtctggctggaagtcgaaggcgcagcgcattatctgcctgcctatgcgggcaacctcgacattatgacttccagtgcgctggcgacagcggaaaaaatggcccagagtctggcgcgcaaggcaggagaagcggcatgaacggtaaaaaactttatatcagcgacgtcacattgcgtgacggtatgcacgccattcgtcatcagtatagcctggaaaacgttcgccagattgccaaagcactggacgatgcccgcgtggatagcattgaagtggcccacggcgacggtttgcaaggttccagctttaactatggtttcggcgcacatagcgaccttgaatggattgaagcggcggcggatgtggtgaagcacgccaaaatcgcgacgttgttgctgccaggaatcggcactattcacgatctgaaaaatgcctggcaggctggcgcgcgggtggttcgtgtggcaacgcactgtaccgaagctgatgtttccgcccagcatattcagtatgcccgcgagctcggaatggacaccgttggttttctgatgatgagccatatgaccacgccggagaatctcgccaagcaggcaaagctgatggaaggctacggtgcgacctgtatttatgtggtggattctggcggtgcgatgaacatgagcgatatccgtgaccgtttccgcgccctgaaagcagagctgaaaccagaaacgcaaactggcatgcacgctcaccataacctgagtcttggcgtggcgaactctatcgcggcggtggaagagggctgcgaccgaatcgacgccagcctcgcgggaatgggcgcgggcgcaggtaacgcaccgctggaagtgtttattgccgccgcggataaactgggctggcagcatgggaccgatctctatgcgttaatggatgccgccgacgacctggtgcgtccgttgcaggatcgaccggtacgagtcgatcgcgaaacgctggcgctgggatacgctggtgtttacagcagcttcctgcgtcactgtgaaacggcggcggcgcgttatggcttaagtgcggtggatattctcgttgagctgggcaaacgccggatggttggcggccaggaggatatgatcgttgacgtggcgctggatctgcgcaacaacaaataatgatgactgccgagaacgtgcattttgtatgcccatcccagcacgactgccggatgcggcgtgaacgccttatccggcctacggatggcgtgagaatttgtaggtctgataagacgcgttagcgtcgcatcaggcatctgcgcacgactgccggatgcggcgtgaacgccttatccggcctacggatggcgcgggaatttgtaggcctgataagacgcgttagcgtcgcatcaggcatctgcgcacgactgccggatgcggcgtgaacgccttatccggcctacgggtggcgcgagaatttgtaggcctgataagacgcgttagcgtcgcatcaggcatctgcgcacgactgccggatgcggcgtaaacgccttatccggcctacggatggcgcgggaatttgtaggcctgataagacgcgttagcgtcgcatcaggcatctgcacacgactgccggatgcgataaacgtcttgtccggcctacatttcgcccgtaggcagtcattaaatagttctgattacgcggctggcaatgtatcagtcgcgattcacctgcactcgcaacgaggttcatcttatgagcactcgtacccctagtagttctagttcccgcctgatgctgaccatcgggctttgttttttggtcgctctgatggaagggctggatcttcaggcggctggcattgcggcgggtggcatcgcccaggctttcgcactcgataaaatgcaaatgggctggatatttagcgccggaatactcggtttgctacccggcgcgttggttggcggaatgctggcggaccgttatggtcgcaagcgcattttgattggcagtgttgcgctgtttggtttgttcagtctggcaacggcgattgcctgggatttccccagtctggtctttgcgcggctgatgaccggtgtcgggctgggggcggcgttgccgaatcttatcgccctgacgtctgaagccgcgggtccacgttttcgtgggacggcagtgagcctgatgtattgcggtgttcccattggcgcggcgctggcggcgacactgggtttcgcgggggcaaacttagcatggcaaacggtgttttgggtaggtggtgtggtgccgttgattctggtgccgctattaatgcgctggctgccggagagcgcggttttcgctggcgaaaaacagtctgcgccaccactgcgtgccttatttgcgccagaaacggcaaccgcgacgctgctgctgtggttgtgttatttcttcactctgctggtggtctacatgttgatcaactggctaccgctacttttggtggagcaaggattccagccaagccaggcggcaggggtgatgtttgccctgcaaatgggggcggcaagcgggacgttaatgttgggcgcattgatggataagctgcgtccagtaaccatgagcctactgatttatagcggcatgttagctagcctgctggcgcttggaacggtgagcagttttaacggtatgttgctggcgggatttgtcgcggggttgtttgcgacaggtgggcaaagcgttttgtatgccctggcaccgttgttttacagtagccagatccgcgcaacaggtgtgggaacagccgtggcggtagggcgtctgggggctatgagcggtccgttactggccgggaaaatgctggcattaggcactggcacggtcggcgtaatggccgcttctgcaccgggtattcttgttgctgggttggcggtgtttattttgatgagccggagaagtcgaatacagccgtgcgccgatgcctgacgtgccttattaggcaggggcgaaagggacttcaccccaatacacctacggcgtttacaggtatactcgctaaaaattattcagcgggtttggaaacaaagatggcaaaacttaccttacaagagcagttgctcaaagcaggattagtcaccagcaaaaaagcggcgaaggtggagagaacggcgaaaaaaagccgcgttcaggcgcgtgaagctcgggcggcggtagaagaaaataaaaaggcacagcttgagcgtgataaacagcttagcgaacagcaaaaacaagcggcgttggcgaaagaatataaagctcaggtgaagcagcttattgaaatgaaccgaatcaccattgccaatggcgatattggttttaacttcactgacggcaatctgattaagaagatttttgtcgataagctcacacaggcgcagttgattaatggtcgtctggcgattgcccgcttgttggtcgataacaatagcgaaggtgaatacgccattattcccgccagcgttgccgataaaattgctcagcgcgatgccagcagtatagtgttgcacagcgcgctcagcgccgaagagcaggatgaagacgacccgtatgccgacttcaaagtgcctgatgatttgatgtggtaaacatagataagtcgtgcgcagatgcctgatgcgacgctatgcgcgtcttatcaggcctacggtttatgggcgaagtgtagaccggataaggcgttcacgccgcatccggcagtcgtgcgccatgcctgatgcgacgctttgcgcgtcttatcaggcctacggcttacgggcgaagtgtaggccggataaggcgttcacgccgcatccggcagtcgtgctattatcaacgcatattcagtttattggcgtggtaggcaatatgctcgccaataaaactggagacaaaataatagctgtgatcataaccctcgtgataacggattaacgtcttgatattcatctcctggcagatcttttcaagatttggagtccgcagctgttctgcgtaaaaatcatcactcaacccctgatcaaccatgatttccgcaacgcgttgaccttgactaataagactcaccgggtcgtaatccaaccaggcatctttattttcagcaagatatgcagcaaaggcttgctgtccccacggcacttggcttggggagacaatggggctaaacgcgctgacgctgacatattcatctgggttacgtaacgccagcaccagcgcgcccagcccgcccatagaatgaccagagatagactttttggccgttgccggaaaatgatgcatcactaaatccggcagctcgttgcggatatagtcatacattttgtaatgttcattccacggcgcttgcgtcgcgttcaggtaaaacccggcaccttgcccgagatcgtaacggtcagcatctgcgacatgactgcctcgcggactggtgtccggcgcaacaacaataatgttgtgctcagccgcgtaacgctgcatcccgcttttagtaatgaaattctgctcgttgcaggtcaggccactaagccagtacagcaccggcaatttttcattcgcggcttttggtgggagatagacgccgacattcatttcacatttcagactttgggaataatgccgatacatattttgccagccgccaaagctgacatgtttttcaatgagttccatcagtcattatctcagggttaatcccccggacggctgcccggggagagtattaagaacccccgcctgaagtggacggggtaaacctgcgggaaatcagtaacgaattacggttcgaatggatttgccttcatgcatcaggtcgaaggcgtcattaatttcatccaggctcatggtatgcgtgacaaacggttccagatcgatatcacctttcatcgcatcttcaaccatgcccggtaactgggaacgacctttcacgccgccaaacgcggaacctttccatacgcgaccagtgaccaactggaatggacgggtggagatttcctgaccggcaaccgcgaccccgatgatcacgctctgaccccagccgcggtgcgcactttccagcgccgcacgcatcacgttgacgttaccgatgcattcaaaggtatggtcgataccccatttgttgatatccaacaggacatcttttatcggtttgtcgtagtcattcgggttaatgcagtcggtagcaccgaagcgacgcgccagatcgaatttcttcgggttggtatcgatagcgataatccgacccgctttcgcctgacgcgcgccctgaaccactgccagaccaatcgcgccaagaccaaacacggcaacagaatcacctggctggactttagctgtgttgtgtaccgcgccaataccggtggtcacgccacagcccagcaggcagacgtgttcatggtttgcttctggattaatttttgccagagacacttccgcgactacggtgtattcactgaatgtagagcaccccatgtagtgataaagcggctgcccgttgtaagaaaaacgggtggtgccgtctggcatcaggcctttaccctgggtttcgcgaaccgcaacacagaggttagttttgccagaacgacagaactcacactcgccgcactccgcggtgtaaagcgggatcacatggtcgccaggtttgacgctggttacgccttcaccgacttcaaccacaacgccggccccttcgtgaccgagaaccaccgggaatacaccttccgggtcatcgccggagagggtaaatgcgtcggtatggcaaacgccggtatgggtgactttaattagcacttcaccttttttcggtggtgcaacgtcaatttcaacgatttccagcggtttaccgggagcaaatgcaacggcagcacgacttttcatctctcgctcttcctcaatatggtaatagattcagttatttaagataggcacgaaccagttcaatagtgtcgtcaacggattggctgacttcgcggctgtagcagtcatttcggtcaaacgtttcccggatatggctttcaagcacttctgccatcagcccattagccgcgccccgaacggcagcgatctgttggagtatggcacggcattcggcatcaccctccaggctccgttccagagcatcaatctgcccccgaatacgacgaactcgagtaaggacctttttcttctcttccggagtactgggcatttcgcacctcatcatctgcatgcaatatactataggggggtattctatatgtcaatgcatacccccctatagtatataacactggagaataaaatttatccggtgaatgtggtcggaaaacaaagaggaaaggggggggggctaatcggcagggaaggccgccccggatagcgggcggcagaaggaatcagaatttccaggtcagacgggctgcaagttgcagaccgttacgagatggacggtcccctcgcccccttggggagagggttagggtgagggggcgttcaccgtactttcaacaggttaactccccctttctgagaggaaacaaaattaacgcagaatcttcttctcagccaaatccagcgcaaagtagctgaaaatcagatccgcacccgcacgcttaatgctacctaagctttcgagcacgactttctcttcatctatagcacccgccagcgcggcgaacttaatcatcgcatactcaccgctcacctgatacgcgccaatcggcaattcagtacgttcacgcagctcacgcacgatgtcgaggtacgctccagcaggtttaaccatcaggcagtctgcgccctgggcttcatccagcagactttcacgaatcgcctcacgacggttcattgggttcatctgatagcttttgcggtcgccttttaatgcgcttccggcagcttcacggaacgggccataaaaggaggaggcgaacttggtgctatagctcataatcgccgtatctttaaatcccgcagcgtccagcgcctgacgaatcgcctgtacctggccgtccatcgcggcggaaggggcgatgaagtctgcacctgcagcagctgcaaccacggcttgcttgcctaaattttccagagtcgcgtcgttgtcgacgccatgctcgcacagcacaccgcagtgaccgtgagaagtgtattcacagaagcaggtgtcactcataacgatcatttctggcacggtctgcttgcagatgcggctcatacgcgccaccagtccatcttcccgccaggcatcgctgccggtttcatcggtatggtgagagatgccaaaagtcatcacggaacgaataccggcgttggcgatgcgttcaatttcgcgtgccagatgtttctctggaatgcgcatcacgcctggcatggcttcaacggctttgtagtcgtcaatttcttcttcaacaaagatcggcaacaccaggtcgttaaggctaagtgttgtctcttcaaacatagcgcgcagcgcaggagatttgcgcaggcgacgagggcgttggattaagtctgtcatggtctgcctgatgtttgtggaatcgaggggcatagtatacctgaagcagggtagggatgttttacgaaagttgtcgcgatgttgacaagaagagaatggaagagaggccaggacatctttttaatagaaacagcaataattttatattcactgaaaatatttttaatcttgaatattatcgggcgttaaaatattacattgtggttttcaatgcgttatccgcagcgtgacgctccagcgccagttcaatcaaacgtgtgatcagatcggtgtaacccagaccgctggcttgccacagcttcggatacatactgatattagtgaagccaggcagggtgttgatctcgttgatcaccacttcgttctctggggttaaaaacacgtctacacgcgccatgcctgcgcatcccaacgtttgataagcctgaacggcaatcgcccggatcttatcgttgatttctggcgcaatggctgccggaactaccactttcgcgccatcttcgtcaatgtacttggtgtcgtaggcatagaaatcgctggtgagtacgatctctccacaggtgctggcttgcggattgtcgttgcccagaactgcgcattcgatctcacgacctttgatcccttgctcaacgatcactttatgatcgaactcgaacgccagatcgacggcaattgcgtactgttcttcactggttactttgctgacaccaacagaagagccctgattagccggttttacaaacagtggtaaccccagtttagactccacttcggcaaaactaatgttgtgacgattggcgcgcgtcagggtaataaatggcgcaatgttcagcccggcatcgcgtagcagacgtttggtgacatctttgtccatacaggctgcactagccagaacatcagaacctacaaacggtaaattggcgacccgcagcattccctgcaaggaaccatcttcgcccagcgtaccgtggacaatcgggaaaatgacatccaccgtcggcaacggctgaccgttttgcgcgtcgataagctgatgctcatgtttacctggcacctgcgcaaggctggtcgcgctagggcgcaacgcaatatgggcaggatcgtctgcatttagcagataattgctggcatcgctgacgtgccattgcccttgtttatcaatgcccagcagcacaacgtcgaagcgacttttatcaatggcatcgacaatgttttttgcgctttgcagagacacttcatgttccgcacttttaccaccaaaaacgattcctacccgcagtttttccatcttaaaaacctatcccgtctaacacaaagtgcatacattaccacgacaaaacgggggattcgcggccttctgaaagattgttgcaatcttctgctgacaaagcgtgcaacgtactggtgaagaaagtgcgttatctcaaagatgtgcgcaagatcacaaaaatgatgaacgggaagctaatttattcctggcttaaatggccatgcggtgagtttttttctcttaattataagttaacgaagagaatatatttcataacttttatttataataaaggttgataattaaaagcctatattttgtgtgggtaattatttaaataagagaaacgtttcgctggtaatcaaacaaaaaatatttgcgcaaagtatttcctttgtcataaaaataatacttccagacactatgaagttgtgaaacataatgttaacttctccatactttggataaggaaatacagacatgaaaaatctcattgctgagttgttatttaagcttgcccaaaaagaagaagagagcaaagaactgtgtgcgcaggtagaagctttggagattatcgtcactgcaatgcttcgcaatatggcgcaaaatgaccaacagcggttgattgatcaggtagagggggcgctgtacgaggtaaagcccgatgccagcattcctgacgacgatacggagctgctgcgcgattacgtaaagaagttattgaagcatcctcgtcagtaaaaagttaatcttttcaacagctgtcataaagttgtcacggccgagacttatagtcgctttgtttttattttttaatgtatttgtacatggagaaaataaagtgaaacaaagcactattgcactggcactcttaccgttactgtttacccctgtgacaaaagcccggacaccagaaatgcctgttctggaaaaccgggctgctcagggcgatattactgcacccggcggtgctcgccgtttaacgggtgatcagactgccgctctgcgtgattctcttagcgataaacctgcaaaaaatattattttgctgattggcgatgggatgggggacagcgaaattactgccgcacgtaattatgccgaaggtgcgggcggcttttttaaaggtatagatgccttaccgcttaccgggcaatacactcactatgcgctgaataaaaaaaccggcaaaccggactacgtcaccgacagcgctgcaagtgcaaccgcctggagtaccggtgtcaaaacctataacggcgcgctgggcgtcgatattcacgaaaaagatcacccaacgattctggaaatggcaaaagccgcaggtctggcgaccggtaacgtttctaccgcagagttgcaggatgccacgcccgctgcgctggtggcacatgtgaccagccgcaaatgctacggtccgagcgcgaccagtgaaaaatgtccgggtaacgctctggaaaaaggcggaaaaggaagcattaccgaacagctgcttaacgctcgtgccgacgttacgcttggcggcggcgcaaaaacctttgctgaaacggcaaccgctggtgaatggcagggaaaaacgctgcgtgaacaggcacaggcgcgtggttatcagttggtgagcgatgctgccagtctgaatagcgtgacggaagcgaatcagcaaaaacccctgcttggcctgtttgctgacggcaatatgccagtgcgctggctaggaccgaaagcaacgtaccatggcaatatcgataagcccgcagtcacctgtacgccaaatccgcaacgtaatgacagtgtaccaaccctggcgcagatgaccgacaaagccattgaattgttgagtaaaaatgagaaaggctttttcctgcaagttgaaggtgcgagtatcgataaacaggatcatgctgcgaatccttgtgggcaaattggcgagacggtcgatctcgatgaagccgtacaacgggcgctggaattcgctaaaaaggagggtaacacgctggtcatagtcaccgctgatcacgcccacgccagccagattgttgcgccggataccaaagctccgggcctcacccaggcgctaaataccaaagatggcgcagtgatggtgatgagttacgggaactccgaagaggatagtcaagaacataccggcagtcagttgcgtattgcggcgtatggcccgcatgccgccaatgttgttggactgaccgaccagaccgatctcttctacaccatgaaagccgctctggggctgaaataaaaccgcgcccggcagtgaattttcgctgccgggtggtttttttgctgttagcaaccagacttaatggcagatcacgggcgcatacgctcatggttaaaacatgaagagggatggtgctatgaaaataacattactggttaccttgcttttcggtctggtttttttaaccaccgtcggcgctgccgagagaactttaaccccacaacaacagcgtatgacctcctgtaatcagcaggcgacggcgcaggcgttgaaaggggatgctcgtaagacctacatgagtgattgcctgaagaacagcaagtctgcgcctggcgaaaaaagtttgacgccacagcagcaaaagatgcgcgaatgcaataatcaagcaacacaacaatctctgaaaggtgatgatcgtaataagtttatgagtgcctgcctcaagaaagccgcctgatacctgatagtgctaacgggtgagctacgaaaatggctcacccgaaatatcatacttctgcctttagctccgtctctataatttgggaaaattgtttctgaatgttcccaaaaataatgaatgatgaaaactttttcaaaaaagcggcggcgcacggggaggaacctcctttaactcctcaaaacgaacatcagcggtccgggctgcgcttcgcccgtcgcgtcagactaccccgtgcggttggcctggctggcatgttcttaccgattgctagtacgctggttagtcacccgccgccgggctggtggtggctggtgttggtcggctgggcgttcgtctggccgcatttagcctggcagatagcgagcagggccgtcgatccgcttagccgggaaatttacaacttaaaaaccgatgcagtattagcgggaatgtgggtaggcgtaatgggcgtaaacgtgctgccttccaccgcgatgttgatgattatgtgtctgaatttgatgggggcaggcggcccccgtctgtttgtcgcgggtctggtgttgatggtggtttcctgccttgtcaccctcgagctgacgggcattaccgtgagcttcaatagtgcgccgctggaatggtggctctcccttcccattattgtcatttatcctctgctgtttggctgggtcagctaccagacggcaaccaaactggcggaacataaacgcaggttgcaggtcatgagtacccgcgacggcatgacgggcgtgtataaccgacgtcattgggaaactatgttacgcaatgaatttgataactgtcggcggcataatcgcgatgcaacgttactgattatcgatatcgaccatttcaagagcatcaacgatacctggggccatgatgtgggcgatgaagcgattgtggcgcttacccgacagttacaaattaccctgcgcggtagcgatgtgattggtcggtttggcggcgatgagtttgcagtaatcatgtccggtacgccagctgagagcgccattaccgccatgttacgggtgcatgaagggctaaatacattacgtttgccgaatacgccacaggtaactttacggattagtgtgggggttgcgccgctgaacccacaaatgagtcactatcgtgagtggttgaaaagcgcagatttggcgctttacaaagcaaagaaagccggacgtaaccgcaccgaagtggcggcctgacgtccggcgaaagtcatcaggatttgctgagtttttcacttttttccatacacttcgtcatcgcttcgatcactgcagcacggaagcctttctcttccagtacgcgtaccgcttcaatggtggtgcctcccggactgcagaccatatctttcagtgcccccggatgttctcccgtttccagcaccatttttgcggaacccattaccgcctgagcggcaaatttatacgcctgggcgcgtggcatcccgcccagcacggcggcgtcggccatcgcttcgataaacataaatacgtaggctgggctagaaccgctcacaccgaccaccgggtggatcatcggctcagcaattacttccgcttcgccaaagcagcggaaaatattcagcacatcagcggtatcttctggggttaccagcgcgtttggcgttacggaggtcatcccggcattaaccagtgcgggagtgttcggcatggcgcggataattttccggtcatggcccagcgcgcgggcaagctggtcgagcgtgacacctgcagcaatagaaacgaccagagagtctttattcaggctggaggtgatttcgctaagcactttaatcatgatgccaggtttaacggcagcaaaaatgatgtcggcgatttgcgccacttcttgcgcgctttctgcggcgttgatgccgaactggtcatgcagggcggcgactttatccggggagggggtgtatacccagatttgccctggaagcacctgaccgctggcaatcagaccgccgagaatggcttttcccatattgccgcagccaataaaaccgattttcttttccattgcctcactcctgccgtgaaattcattgttttgataatcgctggcagaagcataaacagaactatgccggaaggcaaaagcgcgacacaatagaggattacccaacaaaggatgactttatgacaatttgggtggatgccgacgcgtgtcccaatgtaattaaagagattttgtatcgcgcggcggaacgtatgcagatgccgctggtactggtagcaaaccagagtttacgcgtgccgccaagccgatttattcgtacgctgcgcgtcgcggcaggtttcgacgttgccgataacgaaattgtccggcagtgtgaagcgggcgatttggtgatcaccgcagatatacctttggctgctgaagccatcgagaaaggcgctgcggcgcttaatccgcgcggcgaacgttacacgccagcgaccattcgtgagcgcctgacgatgcgcgattttatggataccttacgtgccagtgggatccagaccggcggaccagatagccttagtcaacgtgaccgccaggcctttgccgcggagctggagaagtggtggctggaagtgcaacgtagtcgtggctaaatgtaatttattatttacacttcattcttgaatatttattggtatagtaaggggtgtattgagattttcactttaagtggaattttttctttacaatcgaaattgtactagtttgatggtatgatcgctattctcatgacaccggctttcgccgcattgcgacctattggggaaaacccacgatgacacaacctctttttctgatcgggcctcggggctgtggtaaaacaacggtcggaatggcccttgccgatagccttaaccgtcggtttgtcgataccgatcagtggttgcaaagtcagctcaatatgacggtcgcggagatcgtcgaaagggaagagtgggcgggatttcgcgccagagaaacggcggcgctggaagcggtaactgcgccatccaccgttatcgctacaggcggcggcattattctgacggaatttaatcgtcacttcatgcaaaataacgggatcgtggtttatttgtgtgcgccagtaagtgtcctggttaaccgactgcaagctgcaccggaagaagatttacggccaaccttaacgggaaaaccgctgagcgaagaagttcaggaagtgctggaagaacgcgatgcgctatatcgcgaagttgcgcatattatcatcgacgcaacaaacgaacccagccaggtgatttctgaaattcgcagcgccctggcacagacgatcaattgttgattttcgagcgcctatacttaacgttcatcccgtgaaataaggaagaacgatgccaacgaaaccgccttatcctcgtgaagcatatatagtgacgattgaaaaaggaaagccaggacagacggtaacctggtaccaactcagagccgatcatcctaaaccagacagcttgatcagtgaacatccgaccgctcaggaagcgatggatgcgaaaaaacgctatgaggaccctgacaaagagtgaccgcatcagactgctcggaagggattctgagtgccactacaagggatctgcgtcacatttttcataattcatgtttttctaataattagaatattaaacaataacaatccattactggaatcatttggaatctttacattatgccgtgcacgtctgctgctacgctttttgtcatttgtagcacaagtaagtgtcagcagtggtgcttcacacttgcccggtaattaacgacgaaagaaaagtaaggtggatgaacaatgagtgcgagcttggcgatcctgaccatcggcattgtacctatgcaggaagttttgccgctcctgacggaatacattgacgaagataatatttcccatcatagcctgctggggaagttaagtcgtgaagaagtgatggcggagtacgcgccagaagcaggcgaagacaccattctcacattattaaatgacaaccagctggcccatgttagccgtcgcaaagtggagcgtgacctgcaaggtgtggttgaagtgctcgataatcagggttatgacgtcattttattaatgagtacagcaaacattagtagtatgactgcgcgtaatacgatctttcttgagccgagccgaatattgcctccactggtttcctctattgttgaagatcatcaggtgggggttatcgttccggttgaggagatgctgcccgttcaggcgcaaaaatggcaaattttgcagaaaagcccggtatttagtttgggtaaccccattcatgatagtgaacaaaaaatcattgatgccgggaaagaattactggcaaaaggggctgatgtcatcatgctggattgtttaggatttcaccaacgtcatcgcgatttactgcaaaaacagctcgatgttcctgtcttgctgtctaacgtattgattgcacggctggctgcggaattactggtgtaattttgcgtgacagccagcgcctctggcccctatagtgaagtagatgttcaactaccaaacagggccagtttatgcttcaaagtaatgagtacttttccggcaaagtgaaaagtatcggcttttccagcagcagcactggtcgcgccagcgtgggtgttatggttgaaggcgaatacaccttcagcaccgctgagccggaagagatgacggtaatcagtggcgcgctgaatgtgttactgcctgacgcgaccgactggcaggtgtatgaagccggtagcgtgtttaatgttcccggtcacagtgagtttcatctgcaagttgccgaacccacctcttatctgtgccgctatctgtaattcctcgccttccccttgaacgggagggcatttttctgaaatatcctttctttagcccataataatatttcctttgctgcgattttttcaatttccgatatattcataatttatcaaggttgatataaatatcagtgaagatctccagatattgttgcggaactggctacgataaaagataaatcagatgatgaatggtggcgtgcattgctgcaaagtcgcaatgatcatttacgccaaacggcattgcgcaacgcacataccccggcgttgttgttaacgacattgactgagcctcaggatcggagcctggctattaataatccacagctggctgccgatgtgaaaacggcgtggttaaaagaggatccaagtttactcttatttgtcgaacaacccgatcttagcctgttacgtgatttagtgaaaaccggggcaacgcggaaaattcgcagtgaagcgcgtcaccggcttgaggaaaaacaatgacacaacgtccatggagcaagttacagcgtaaaacgcataatattgctgcgctaaaaattattgctcgccgtagcgaataattatatgcctggtgtggcttcgtacgccggataagacgcggcaggcgtcgcatccggcattaaaggaaaatcagcaattaacgttgtgcttcgccacctaatccttcaatcaggttttgaattaacgctgccagttcaccagtcatcaggatgaaatcggcatcaaaacgctgggcgaaatcttcacggtcgatatcttcgttttgatcgcgcagctcgtcgcagaacttcagacgcttgaggctaccatcgtcgcacatcacaaactgaatgcgctgctgccagtcgagcgccagtttagtcaccacttttccggcttcaatgtgattggtgatctcttcgctggtcagatcttgtttcttcgcgcggatcacgccgccatcttccagcaagcttttcagctcggcttcatcaagcagctggaagccctgtgccgcactaccggagcgaacccattcggtcagcgtcagttcaatcgggttttccatgctcaatggtacaaccggtaagctccccaggcttttacgcagtaatgccagcgtatcttccgcttttttggcactggcgcagtccaccataatcaaaccgttaaccgtgtcgatccacatcattgtctggctaaaacggctgaaagcacgcggcagcagagagtgcagcacttcgtctttcaggctatctttttcggttttcttcagcttacgcgcctgttccgcttccagtttggcgattttcgcttccagcgcctgtttaatcaccggagacgggaggattttttcttctttgcgcgcgcagataacaatttgaccattggcaacgtgcgttaacgcatcgctgtggcttcccatcggaggaacccagcccatcttcgccatgtcctggctgccgcatggggtaaatgccatgctggctagctgtttttccatctcttctgcacgcaggctaatctcgcggctaagacggtaaaccattaaatttttgaaccacagcatgataatttccacggccttgtcgttaaatttagcgggcatgataacgaattgtcggcggccttgcattgccaatccggttgtccgtctctacgctattgatattgaaaaaaataaggagagtaccgtgcgtataggtatcgatttaggcggcaccaaaactgaagtgattgcactgggcgatgcaggggagcagttgtaccgccatcgtctgcccacgccgcgtgatgattaccggcagactattgaaacgatcgccacgttggttgatatggcggagcaggcgacggggcagcgcggaacggtaggtatgggcattcctggcagtattagcccttacaccggtgtggtgaagaatgccaatagtacctggctcaacggtcagccattcgataaagacttaagcgcgaggttgcagcgggaagtgcggctggcaaatgacgctaactgtctggcggttagtgaagcagtagatggcgcggcagcgggagcgcagacggtatttgccgtgattatcggcacgggatgcggcgcgggcgtggcattcaatgggcgggcgcatatcggcggcaatggcacggcaggtgagtggggacacaatccgctaccgtggatggacgaagacgaactgcgttatcgcgaggaagtcccttgttattgcggtaaacaaggttgtattgaaacctttattagcggcacgggattcgcgatggattatcgtcgtttgagcggacatgcgctgaaaggcagtgaaattatccgcctggttgaagaaagcgatccggtagcggaactggcattgcgtcgctacgagctgcggctggcaaaaagcctggcacatgtcgtgaatattctcgatccggatgtgattgtcctggggggcgggatgagcaatgtagaccgtttatatcaaacggttgggcagttgattaaacaatttgtcttcggcggcgaatgtgaaacgccggtgcgtaaggcgaagcacggtgattccagcggcgtacgcggcgctgcgtggttatggccacaagagtaaaaaacgtaggcaattggcgcatcatgcctgatgcgacgcttgccgcgtcttatcaggcctacaaaaggtgccagaaccgtaggccggataaggcgttcacgccgcatccggcaataagtgctccgatgcctgatgcgacgcttgccgcgtcttatcaggcctgcaaaatgtgccagaaccgcgtagggcggataaggcgttcacgccgcatccggcaataagtaatgagcaccgagactataacttaccccagtggtttcgccagcaccggagtatccgccgcttgctggcgcttatagcgaccatacagcagcaagctgctcatcgcagcaaagctaagcagggcggcaggcagcgccacgtaattatatgccagccccagcgtcagcatcatacctccgcaatatgcgccgacggcgctaccgaggttaaacgctatttgcccacctgcggcacctaataactctccgcctttggcgttttgtagtaacaatatttgtagcggtgcactaagggcaaataatcccgcgcaacaaataaaagcaaaaataaggctcgttgttttcatgccgccgcagaaaaagagcatcagcagtgccagtacaattataaagtcagttactgctgcaatgcgcagtggactataacgtccactaatcctgccacttagcatatttcccagcaccatccctagcccaactaacatcataataaaggtcatcgccgtttcgctaaaaccggaaataaacatcatgtatggctttacgtagctgaaccaggcaaacacacctgcgttgccaaacatcgtggcggcgaaaattaaccacggggccgggctgcgcaaaaagtgaaattgttcgcgcagatttcctttcgcctcgtcgcgaatatctggcacccaaaaatagacgcttgccatcaccgcaatattaaaaacagcgatcaataaaaaggtgtaacgccagctaaattcctgacttaaatacgttcccagcggaatgcccagcaaattggcgactgtcatcccggaaaccatccccgccacggcggcggtgacttttccgggtttgataattttacttaacacgatcgctccgacgccaaaaaatgcgccatgcggaaagccggataccagccgaccaatggcgagcatcaggtaagagctagagagcgtgaacatggcgttgccaatgacgcacaacgccaccagaaacaacaagatatgtttgagactgtagcggctggaaaagagtgcgatgattggcgcaccgaccaccacccccagtgcataatagctgatcatatgcccggcggcaggaatgctaattcctacgttatgcgccagctccgtgagcacgcccataatgccaaattcggccatccccaaaccaaacgtgcccagagccaaagataaaatgacttttttcataccaccatcacaaccaccagaacggctaccaatcaccgtagccaataaagtgatagcttgcaggataacgaccagcaaggccaagagataattcgcccctctgtattcattatcctgctgaatagttatttcactgcaaacgtactttccagtttgctgtagcccaggccgttgatctttttcactttgatctgcaccggaatacgctctttcatcgcttctacgtggctaatcacaccgatggttttgccactggcgttcagggcatccagcgcatcaagggcggtatccagcgtttcgctatccagcgtgccaaaaccttcatcaaggaacaggctgtcaatacgtgttttatggctgaccagatcgctaagcgccagcgccagcgccagactaacgaggaaactttcgccgccggaaagggtacgggtatcgcgtaccgcatctgcctgccaggtatcaacaacctcgacttccagcgcctcgctggctttgcgctgtaacagatagcgcccgtgcagccgggtaagttgctgattagcgagatggactaaattatccagcgtcagcccctgggcaaacttgcggaatttatcgccctctttggaacctattaggctattcagatatccccagtcctcaacctgctgcgtcatttgagcaatttgctgcattaaggtttgttgttgctgacggttatctgcatcctgcttcagctgctggcgaatctcgccttgactcgtggtgttttcacgcaacttttggtgagtttgcgctaactcttgctgaatctgctccaccgtcacagtgagagccaacccgtcgtcaggtcggtgttgttgatgctgtgccagcgtttctgctgtctgagtgaccagagtttgcgcctgacggcgctggttttccagattctgcttgagctgttccagctgcgttagtgtttgttcatccattagcgccgcaaggaacgcctgctgatcgtcaaagacgctggcctgtagcgcggtgtcaaactgcgcctgggctttttgcagactttgcgccgccagaacatcctgttgctgtaacgtctgctgctggctgtgtaatgcgagacattgttcatgtacctgccgccagttttccaataccacagtttcttcgcagtgcgggagttcatcactttgcggcaacgtttccagaatcggcgtcagctgctgaatacggttttgcagcgcggttaattcgttctggcgttgctgccagctctgcgcttcttgctgacgtgtcgccaaccagctctcttcttcatcttcctgtggcaatgtcagtgcataacccgtcaatgtcgttaaaagtagttgctggcgttgttcaatttgctgttgatactggataatttgctgattatgcgcggcaatctgcccttgtaattcatgccgttggctgagtaaccgcagctggcgttcgtgctcatcttgtgcatccagccacggttgaatatcgtccagtggctgcaaggtgatattgaggctggccgtgacggcttgccattgttgagtaagtgcttgctcatcttgtcggaggctttgcgcttcgttttcatcacgctgaagctgctttgttatggcgtccagttgcccacgtagcgtcgcaccttcttcaccgagctttttaacttcgttttccagcgccagtaatcgagactgattaacgccaggctccagcgcctgatacgcctcgaccgccgggtggctggtggaaccacaaagtgggcaaggctgacccgcctgtaactgtgcacgttgagcttccagcgttttgatgcgcgcttcctgctcgcaaatggttttcacatcggcaagttgctgcgtcttttctttataacgctggcgcatttcgttaagtgcggcgttacgttgcgtctgttcttgcgtgacattctggatagcgacctgtaactgcgccagacgtttttgttggggaacaatctgtccatgcagcgcgaccaggtgctgacgcagtgggcgttgctcagcatgttgcgccagggcggtagcaacttcatcggcggttaacgtcaacgtgatcgccgcaagcgcattaagtttttgctcagcatgggttaactgttgctgccattgccgcagatgctcgcgatcgctggtttgttgggagaactgcgcacgccaacccgccggttcgttgttccactgacggaagcggtcgtgttcctgtaaccaggtattcaggctttgttgctgctgctgtaattctgcactctgcttcgccgcgtggtggcgaatgctcgcgcgaagcgccattgtgctctgtaagcgagtatttacttcttcaatctgctggcgaatatgcgccagcgccgcgctgtgttctgcgatgcgttcccagtgtggacgaagatttcgtgccggttgtgccagactaagcgccgccagttgaggttgcgctttttcttcttcggctaacgcctgttgcaaggcctgctgacggcggctggcttcttgctgcaattcgtcctgacgcgttaaccagtttaggctttgttgttcttgctgctgcgcggtaattaactgtttttcttcgtcagtaagtacctgcaaactcgctgtcaggctttgcacttgttccggcgtgagcaacgtgacgccgctggcctgcgcttgcagcttctccagctctgtgcgggcgcttttgtgctgctcaaaaaccatcgcgctgatttgcccgtagatttcagtgccggttaactcctcgagcaattccgcgcgttctttgggtttggcattcaggaaggcagcaaattgcccctggctaagcagcatgctacgggtgaagcgcccgtaatccagcccggttaacgtcgctgtcagttccagcttatctttcactttgtcggcgagaattttgccgtcggcgcagcgcgccagctctacgcgtggcacctgcaaattaccgtcgggttggttacgcgcccgattctggctccagaatgcacggtacgcttcacctttcacttcaaactccacctccgccagacattcggcggtatcgcgggtcatgagatcattttggctttgactaacgttagagagacgcggagtttcgtgatacagcgccagacaaatggcgtccagcagggtggttttccccgcacctgttgggccggtaatagcaaacagcccgttgctggcgaacggctcgcgggtgaaatcaatcttccattcgccttttaaactgttcaggtttttcaggcgcaggctgagaattttcatgcttcgtgttctccggcgagggtatgcaacgtcgtggtgaaaagatgctgcagacgttgctgctggctttcatccagttcttccagtgccagacggcgattgaacacctcttcgacgctgagttcgctgagggtttcacgctgttggctggctaacacacgctcgcgctgttcacgactccgacgtaccagcaatacttcgacaggcaaactttcggttaatgcctggattttgcgctgaatatcatgcagatactcatcagtagtgatttcgatatccagccagacaggtggctcctggcttacatcgcgccactgttccagctgtgcggtaatgctcgccagatcgcctttcagcactgccatgggttgcgttaccggtacgttcaggttttccacgctctctaatttgccgttactaaatgtcaccagatggacatatttactcttaccgcattcatcaaaactcagtggaatgggggagccgcaatagcgaacatgttccatgccgccaataatctgtgcgcggtgaatatgcccgagcgcgatgtagtcggctggtggaaagttttgtgccggaaacgcgtccagcgtgccaatataaatgtcacgcacggcgtcacttttactggcccccacggtcgttaaatgtcccgtggcgatgatgggcagaggctgatcgccgcgcagtttgcaggcatcggcatagtgttgttggtaataatcggtaatcgctgccagtaaatgctgctgtttttcaataccgttaagccccgcctggctggtaataatgtcacgcggacgtaaaaacggaatggggcacagcactgcgcctggcgtcccgtcgcgacgaggcaagatttgcggcgcatgtccggcgctggcgaccacggtagtattgaggaacgccatgatatcgcggctttcattcagcgtggcgacgctgtcatggtttcctgccagtaccaccagatgacagccagtttgctgtaaattgacaacaaaacggttgtataacgtgcgggcgtaactgggcgggctgccggtatcgaaaacatcaccggcaacaataatcgcatccacctgatgggtttgtgctgtctccagcagccagtcaagaaaagcctgatgttcagcttcgcggcttttactgtagaagttctggccgagatgccagtcactggtgtgaaggatgcgcataacggttccctggcgaaaaagcatgggcgcgattatacccaaacagatgtgccatttgcttttttctgcgccacggaaatcaataacctgaagatatgtgcgacgagcttttcataaatctgtcataaatctgacgcataatgacgtcgcattaatgatcgcaacctatttattacaacagggcaaatcatggcgagacgtattctggtcgtagaagatgaagctccaattcgcgaaatggtctgcttcgtgctcgaacaaaatggctttcagccggtcgaagcggaagattatgacagtgctgtgaatcaactgaatgaaccctggccggatttaattctcctcgactggatgttacctggcggctccggtatccagttcatcaaacacctcaagcgcgagagcatgacccgggatattccagtggtgatgttgaccgccagaggggaagaagaagatcgcgtgcgcggccttgaaaccggcgcggatgactatatcaccaagccgtttagcccgaaggagctggtggcgcgaatcaaagcggtaatgcgccgtattagcccaatggcggtggaagaggtgattgagatgcagggattaagtctcgacccgacatctcaccgagtgatggcgggcgaagagccgctggagatggggccgacagaatttaaactgctgcacttttttatgacgcatcctgagcgcgtgtacagccgcgagcagctgttaaaccacgtctggggaactaacgtgtatgtggaagaccgcacggtcgatgtccacattcgtcgcctgcgtaaagcactggagcccggcgggcatgaccgcatggtgcagaccgtgcgcggtacaggatatcgttttagtacccgcttttaacgccttgctcatcggacgcagagcagggcttatgatttcttaactggagtatcttacgtgctggaacggctgagctggaaaaggctggtgctggagctgctactttgctgcctcccggctttcatcctgggtgcattttttggttacctgccctggtttttgctggcaagcgtaacaggactgcttatctggcatttctggaatttattgcgccttagttggtggctgtgggtggatcgcagtatgaccccgccaccggggcgtggtagctgggaaccgctactatacggcttacaccagatgcagctgcgaaataaaaaacgccgccgtgaactgggcaatctgattaaacgctttcgtagcggcgcggagagcctgcccgacgcggtggtgctgaccacggaagagggcggtattttctggtgtaacggtctggcgcaacaaattcttggtttgcgctggccggaagataacgggcagaacatccttaacctactgcgttacccggagtttacgcaatatctgaaaacgcgtgatttttctcgcccgctcaatctggtgctcaacaccgggcggcatctggaaattcgcgtcatgccttatacccacaaacagttgctgatggtggcgcgtgatgtcacgcaaatgcatcaactggaaggggcgcggcgtaacttttttgccaacgtgagccatgagttacgtacgccattgaccgtgttacagggttacctggagatgatgaatgagcagccgctggaaggcgcggtacgcgaaaaagcgttgcacaccatgcgcgagcagacccagcggatggaaggactggtgaagcaattgctgacgctgagcaaaatagaagccgcaccgacgcatttgctcaatgaaaaggttgatgtgccgatgatgctgcgcgttgttgagcgcgaggctcagactctgagtcagaaaaaacagacatttacctttgagatagataacggcctcaaggtgtctggcaacgaagatcagctacgcagtgcgattagcaacctggtctataacgccgtgaatcatacgccggaaggcacgcatatcaccgtacgctggcagcgagtgccgcacggtgccgaatttagcgttgaagataacggaccgggcattgcaccggagcatattccgcgcctgaccgagcgtttttatcgcgttgataaagcgcgttcccggcaaaccggcggtagcggattagggttagcgatcgtgaaacatgctgtgaatcatcacgaaagtcgcctgaatattgagagtacagtaggaaaaggaacacgtttcagttttgttatcccggaacgtttaattgccaaaaacagcgattaatccgcctttgtcatcttttattgccataagccagtcgatgctggcttattttctttgcagtcaaaatacgggcgttagattttacaacgattggtgattttttgttcgcatgattagccatgtctttttcacggaaatagtgttttatactggttggtgatttcttatcgctatatacctctggtttttagatccctccttgctttaaaacgttataagcgtttaaattgcgcttcaggtgctgtcatactgactgcattaacgcggtaaatcgaaaaactattcttcgccgcgcctggttgggagtatttcccgctaaaattgtttaaatataccgctgtatcatccccagggattggcacaaaaatttaacgttacaacaccacatccacaggcagtatgatttatgacccatcaattaagaagccgcgatatcatcgctctgggctttatgacatttgcgttgttcgtcggcgcaggtaacattattttccctccaatggtcggcttacaggcaggcgaacacgtctggactgcggcattcggcttcctcattactgccgttggcctgccggtattaacggtagtggcgctggcaaaagttggcggcggtgttgacagcctcagcacgccaatcggtaaagtcgctggcgtactgctggcaacggtttgttacctggcggtggggccgcttttcgctacgccgcgtacagctaccgtttcctttgaagtggggattgcgccgctgacgggtgattccgcgctgccgctgtttatctacagcctggtctatttcgctatcgttattctggttagcctctatccgggcaagctgctggataccgtgggcaacttccttgcgccgctgaaaattatcgcgctggtcatcctgtctgttgccgctattgtctggccggcgggttctatcagcacggcgactgaggcttatcaaaacgctgcgttttctaacggcttcgttaacggctatctgaccatggatacgctgggcgcaatggtgtttggtatcgttattgttaacgcggcgcgttctcgtggcgttaccgaagcgcgtctgctgacccgttataccgtctgggctggcctgatggcgggtgttggtctgactctgctgtacctggcgctgttccgtctggggagtgacagcgcgagcctggtcgatcagtctgcaaacggcgctgctattctgcatgcttacgttcagcacacctttggcggcggcggtagcttcctgctggcggcgttaatcttcatcgcctgcctggtaacggcagttggcctgacctgtgcttgtgcagaattctttgcccagtacgtaccgctctcttatcgtacgctggtgtttatcctcggcggcttcagcatggtggtttctaacctcggcttaagccagctgatccagatctccgtaccggtgctgaccgctatttatccgccgtgtatcgcactggttgtattaagttttacacgcagttggtggcataatagctcccgcgtgattgctccgccgatgtttatcagcctgctttttggtattctcgacgggatcaaagcatctgcattcagcgatatcttaccgtcctgggcgcagcgtttaccgctggccgaacaaggtctggcgtggttaatgccaacagtggtgatggtggttctggccattatctgggatcgcgcggcaggtcgtcaggtgacctccagcgctcactaaatcactgaacatttgttttaaccacggggctgcgatgccccgtggttttttattgtgttgatgggttaggaattgatggaaagtaagaacaagctaaagcgtgggctaagtacccgccacatacgctttatggcactgggtagtgcaattggcaccgggctgttttacggtagcgcagacgccatcaaaatggccggtccgagcgtgttgttggcctatattatcggtggtatcgcggcgtatatcattatgcgtgcgctgggggaaatgagcgtacataacccggccgccagctctttcagccgttatgcgcaggaaaacctcggcccgctggcaggttacattaccggctggacctactgctttgaaatccttattgtcgccatcgccgatgtgaccgcttttggtatctatatgggtgtctggttcccgacggtgccgcactggatttgggtactgagcgtggtgctgatcatttgcgccgtaaacctgatgagcgtgaaggtattcggtgagctggaattctggttcagcttctttaaagtcgccaccatcatcatcatgattgtcgccggtttcggcatcatcatctgggggattggcaacggcgggcaaccgaccggtattcataacctgtggagcaacggcggcttcttcagtaacggctggcttggcatggtaatgagcttgcaaatggtgatgtttgcttacggtgggatcgaaattatcgggattaccgccggtgaagcgaaagatcctgagaaaagcataccgcgtgcgattaactccgtgccgatgcgtattctggtgttctacgtcggtacgctgttcgtcattatgtctatctacccgtggaatcaggttggcactgccggtagcccgttcgtgctgacgttccagcatatgggcattacctttgccgccagcattcttaactttgttgtgctgactgctagcctgagcgcaattaacagtgatgtatttggcgtaggccgtatgctccacggtatggcagagcagggcagcgcgccgaaaattttcagcaaaacgagccgtcgcggtattccgtgggttacggtgctggtgatgactaccgcgctgctgtttgcggtgtatctgaactacatcatgccggaaaacgtcttcctggtgatcgctagcctggcaaccttcgccacggtgtgggtgtggattatgatcctgctgagccaaattgccttccgtcgccgtttgccgccagaagaagttaaggcgctgaaatttaaagtgccgggtggggtagcaacgaccatcggcgggctgattttcctgctctttattatcgggttgattggttatcacccggatacgcgtatcagcctgtatgtcggtttcgcgtggattgttgtgctgttgattggctggatgtttaaacgccgccacgatcgtcagctggctgaaaaccagtaatccttgcgttctgtaagccggttcaggaggaaatcctgatccggctattccgaaagttatccgcccccgtcctcctcccccaaatatccttcagatgatgagtgatcctgcattaggctatggcaaggtgatcagattttcatcacaggggaattatgatgttaaatgcatggcacctgccggtgcccccatttgttaaacaaagcaaagatcaactgctcattacactgtggctgacgggcgaagacccaccgcagcgcattatgctgcgtacagaacacgataacgaagaaatgagtgtaccgatgcataagcagcgcagtcagccgcagcctggcgtcaccgcatggcgtgcggcgattgatctctccagcggacaaccccggcggcgttacagtttcaaactgctgtggcacgatcgccagcgttggtttacaccgcagggcttcagccgaatgccgccggcacgactggagcagtttgccgtcgatgtaccggatatcggcccacaatgggctgcggatcagattttttatcagatcttccctgatcgttttgcgcgtagtcttcctcgtgaagctgaacaggatcatgtctattaccatcatgcagccggacaagagatcatcttgcgtgactgggatgaaccggtcacggcgcaggcgggcggaagtacgttctatggcggcgatctggacgggataagcgaaaaactgccgtatctgaaaaagcttggcgtgacagcgctgtatctcaatccggtgtttaaagctcccagcgtacataaatacgataccgaggattatcgccatgtcgatccgcagtttggcggtgatggggcgttgctgcgtttgcgacacaatacgcagcagctgggaatgcggctggtgctggacggcgtgtttaaccacagtggcgattcccatgcctggtttgacaggcataatcgtggcacgggtggtgcttgtcacaaccccgaaagcccctggcgcgactggtacagctttagtgatgatggcacggcgctcgactggcttggctatgccagcttgccgaagctggattatcagagcgaaagtctggtgaatgaaatttatcgcggggaagacagtattgtccgccactggctgaaagcgccgtggaatatggacggctggcggctggatgtggtgcatatgctgggggaggcgggtggggcgcgcaataatatgcagcacgttgccgggatcaccgaagcggcgaaagaaacccagccggaagcgtatattgtcggcgaacattttggcgatgcacggcaatggttacaggccgatgtggaagatgccgccatgaactatcgtggcttcacattcccgttgtggggatttcttgccaataccgatatctcttacgatccgcagcaaattgatgcccaaacctgtatggcctggatggataattaccgcgcagggctttctcatcaacaacaattacgtatgtttaatcagctcgacagccacgatactgcgcgatttaaaacgctgctcggtcgggatattgcgcgcctgccgctggcggtggtctggctgttcacctggcctggtgtaccgtgcatttattacggtgatgaagtaggactggatggcaaaaacgatccgttttgccgtaaaccgttcccctggcaggtggaaaagcaggatacggcgttattcgcgctgtaccagcgaatgattgcgctgcgtaagaaaagtcaggcgctacgtcatggcggctgtcaggtgctgtatgcggaagataacgtggtggtatttgtccgcgtgctgaatcagcaacgtgtactggtggcaatcaaccgtggcgaggcctgtgaagtggtgctacccgcgagtccgtttctcaatgccgtgcaatggcaatgcaaagaagggcatgggcaactgactgacgggattctggctttgcctgccattagcgctacggtatggatgaactaacgttttataacgccttgcgactcgcctgcgccatcatccgcggataaaactgccagaagcgggtttcgagggcgtcataatgagcgtctaaatcgtaccaggagtcacgcagggcatccagacgtgggcggcggcttgccatgccgtttaacacgttctggatgaaatccatatcgcgatagcgcaccagccactgctcactccacaagtaattgttcagattgataaaacgtggcggactgtccggcaaaatcgtcatcacttgctcgcgggcataacagacaaattcctgtagcggaaagtccgggctcagctggctccagtggcgggaaagaaagtgatcccacatgacatccagcgtaataggcgcaacgcggcgcgtttcactacgaaaccactcccgtgcttcgcggacttccggcagattgtcagtcaatacgtcgatacgtcgatgcatatgaatgccagccacgacgtcgggcggaaaactttcttcaggatttccgcgtacgaaatcagccagtaaattgccggaaaggctgctttccgcgagatgggctaaatgcaggtgagctaaaaaattcatcgattatattctatccaaaagggggtaaaggttgcagggagagcgccccggcactagactacccgcctcttattttagtctgagtcagtgtcatgcgcgttaccgatttctcctttgaattgcccgaatccctgattgcccactatcccatgcctgaacgcagtagctgtcgtttactgagcctggacgggccgacgggcgcgctgacgcacggtactttcaccgatttacttgataagctcaaccccggcgatcttctggtttttaataatacccgcgtgatcccggcgcgcctgtttgggcgtaaagccagcggcggcaagattgaagtgctggttgaacggatgctcgacgacaaacgcattcttgcgcatattcgcgccagcaaagcgccaaaacctggcgcagaactgctgctgggcgatgacgaaagtattaacgcaacaatgaccgcgcgccacggcgcactgtttgaagtcgaatttaatgatgaacgcagcgtgctggatattctcaacagcatcggccatatgccgctgccgccgtatatcgaccgtccggacgaagacgctgaccgcgaactttatcaaaccgtttatagcgaaaaaccgggcgcggttgcagccccgaccgcaggtctgcattttgacgagcctttgctggaaaaattgcgcgccaaaggcgtggagatggcgtttgtgacgttgcacgttggtgcgggcaccttccagccggtgcgcgtcgacaccattgaagatcacatcatgcacagcgaatacgctgaagtaccgcaggatgtggtagacgcggtactggcggcgaaagcgcgcggtaaccgggtgattgcggttggcaccactagtgtacgtagcctggaaagcgcggctcaggcagcgaaaaacgatctcattgaaccgttcttcgacgatacccaaatctttatctatccgggcttccagtacaaagtggtcgatgcgctggtgacgaacttccacttgccagagagcacgctgattatgctggttagcgcctttgccggttatcaacacaccatgaacgcctataaagcagcggtagaagagaaatatcgcttttttagttacggtgatgcgatgtttatcacgtacaatccgcaggcaattaatgagcgcgtcggggagtaattccgcggcgctggtttaaaacgttggactgtttttctgacgtagtggagaaaaaatgaaatttgaactggacaccaccgacggtcgcgcacgccgtggccgcctggtctttgatcgtggcgtagtggaaacgccttgttttatgcctgttggcacctacggcaccgtaaaagggatgacgccggaagaagttgaagccactggcgcgcaaattatcctcggcaacaccttccacctgtggctgcgcccgggccaggaaatcatgaaactgcacggcgatctgcacgattttatgcagtggaaggggccgatcctcaccgactccggcggcttccaggtcttcagccttggcgatattcgtaaaatcaccgaacagggcgtgcacttccgtaacccgatcaacggcgatccgattttcctcgatcctgaaaaaagtatggagattcagtacgatcttggtagcgatatcgtcatgatctttgatgagtgtacgccgtatcctgctgactgggattacgcaaaacgctccatggagatgtctctgcgttgggcgaagcgtagccgtgagcgttttgacagtctcggaaacaaaaatgcgctgtttggtatcatccagggcagcgtttacgaagatttacgtgatatttctgttaaaggtctggtagatatcggttttgatggctacgctgtcggcggtctggctgtgggtgagccgaaagcagatatgcaccgcattctggagcatgtatgcccgcaaattccggcagacaaaccgcgttacctgatgggcgttggtaaaccagaagacctggttgaaggcgtacgtcgtggtatcgatatgtttgactgcgtaatgccaacccgcaacgcccgaaatggtcatttgttcgtgaccgatggcgtggtgaaaatccgcaatgcgaagtataagagcgatactggcccactcgatcctgagtgtgattgctacacctgtcgcaattatagtcgcgcttacttgcatcatcttgaccgttgcaacgaaatattaggcgcgcgactcaacaccattcataaccttcgttactaccagcgtttgatggcgggtttacgcaaggctattgaagagggtaaattagagagcttcgtaactgatttttaccagcgtcaggggcgagaagtaccacctttgaacgttgattaatattaataatgagggaaatttaatgagcttttttatttctgatgcggtagcggcaacgggtgcaccggcgcaaggtagcccgatgtctttgattttgatgctggtggtattcggtctgattttctatttcatgatcctgcgtccacagcagaagcgcaccaaagaacacaaaaagctgatggactccattgccaaaggtgatgaagttctgacgaacggtggcctggttggtcgcgtaaccaaagtagcggaaaacggctacattgctatcgcgctgaatgacaccactgaagtagttattaaacgtgacttcgtagctgccgtcctgccgaaaggcaccatgaaggcgctgtaattaaaatttttccctaagggaattgccgtgttaaaccgttatcctttgtggaagtacgtcatgctgatcgtggtgattgtcatcggtctgctgtatgcgcttcccaacctgtttggtgaggatccggctgttcagatcactggtgcgcgcggagtcgccgccagtgagcaaacgctgatccaggtccagaaaacgttacaagaagaaaaaataactgctaagtctgtggcactggaagagggcgctattcttgcgcgcttcgactccactgacacccagttgcgcgctcgtgaagcattaatgggcgttatgggtgacaaatacgtcgtggcgcttaaccttgccccggcaacgccgcgctggctggcagctattcacgctgagccgatgaagctcggccttgacctgcgtggcggcgttcacttcctgatggaagtggatatggacaccgcgcttggcaaactccaggaacaaaatatcgatagcctacgcagtgacctgcgcgaaaagggcatcccgtataccactgttcgtaaagaaaacaactacggcctgagcatcactttccgcgatgctaaagctcgtgatgaagccattgcgtatctgagcaagcgccatccggacctggtgattagcagccagggcagcaaccagctgcgtgcggtaatgagcgatgctcgtctgagtgaagcgcgtgaatatgcggtgcagcagaacattaatatcctgcgtaaccgtgtaaaccaacttggcgtggcggagccggtggttcagcgtcagggtgctgaccgtatcgttgttgaactgccaggtattcaggacactgcgcgtgcgaaagagattctgggtgcgacggcaacgctggaattccgtctggtaaacaccaacgttgaccaggccgctgcggcatccggtcgcgtaccgggcgactctgaagtgaaacagacccgcgaaggtcagccagttgtgctgtacaaacgcgtaattctgaccggtgaccatatcaccgactccacttccagccaggacgaatacaaccaaccgcaggttaacatcagcctcgatagcgctggtggtaacatcatgtctaacttcactaaggacaacatcggcaaaccgatggcaaccctgtttgtggagtacaaagacagcggtaagaaagatgcaaatggtcgtgcggttctggtgaaacaggaagaggtgattaacatcgccaacatccagtctcgtctgggtaacagcttccgtatcaccggcatcaacaacccgaacgaagcccgtcagctgagtctgctgctgcgtgccggtgcgttgatcgcgccgattcagattgttgaagaacgtaccattggcccaaccctgggtatgcagaacattgaacaggggctggaggcttgccttgccggtctgctggtttctattctgttcatgatcatcttctataagaagtttggtctgattgcgaccagtgctctgattgccaacttgatcttaatcgtcggcattatgagcctgttgccaggcgcaacgctgagtatgccaggtatcgcgggtatcgtcttaacccttgcggtggcggtcgatgcgaacgtactgatcaacgaacgtattaaagaagagttgagcaacggacgtactgttcaacaggcaattgatgaaggttatcgtggcgcattcagttctatcttcgatgcgaacatcaccacgctgattaaagtcatcatcctgtacgcagtgggtaccggggcaattaaagggttcgcgattactaccggtatcggtgtggcgacgagcatgtttaccgcgattgtcggtacgcgtgccatcgtaaacctgctatatggcggcaagcgcgtcaagaagctgagtatctgaggagtgcgatgtggcacaggaatatactgttgaacaactaaaccacggccgtaaagtctatgactttatgcgctgggactactgggctttcggcatctctggtctgctgttaatcgctgctatcgttattatgggcgtgcgcggctttaactgggggctggatttcaccggtggtacggttattgaaattacgctcgaaaaaccggctgaaattgacgtaatgcgtgatgcattgcaaaaagccggttttgaagagccgatgctgcaaaactttggtagcagccatgacatcatggtccgtatgccgcctgctgaaggcgaaaccggcggtcaggtgttgggcagccaggttctgaaggtgattaacgaatccaccaatcagaatgcagcagtgaagcgtattgagttcgtcggtccgagcgtgggggcagaccttgcgcaaaccggtgcgatggcgttgatggcagcgctgctgtctatcctcgtgtacgtaggtttccgctttgagtggcgactggcggcaggggtggttattgcgctggcgcacgacgttatcattacgctgggtattttgagcttattccatatcgagattgacctgaccattgtggcaagcttgatgagcgttatcggttacagccttaacgacagtatcgtggtaagcgaccgtattcgtgaaaacttccgcaagatccgtcgcggtacgccttacgaaatctttaacgtgtccttgacccagacgctgcaccgtaccttgatcacatccggtactaccttgatggttatcctgatgctgtacctcttcggtggtccggtactggaaggcttcagcctgaccatgcttatcggtgtttccatcggtactgcatcttccatctatgtggcatctgcgttggctctgaaactgggtatgaagcgcgaacacatgttgcagcagaaagtggaaaaagaaggggcggatcagccgagtattctgccgtaatcaagttcccgttgatgttgaaaatcccggtcagaagatcgggattttttttgatgtatggagattgcgaaaatccccgcatcttgggaaactgcgcgtaaccctacatttcatccaggtaacttttcatggctatcatcccaaaaaactatgcgcggttagaaagcggctatcgcgaaaaagcattaaaaatctatccgtgggtctgcggtcgctgttcccgcgagtttgtttattccaacctgcgtgaacttaccgttcaccacattgatcacgaccataccaataacccggaagatggcagtaactgggaattgttgtgtctctattgccacgatcatgagcatagcaaatataccgaagcggatcagtatggtacgaccgttatcgcaggggaagatgcgcagaaagatgtcggtgaagcgaagtacaacccattcgctgacctgaaagcgatgatgaacaagaagaagtgattaaaacgtaaaattgcctgatgcgctacgcttatcaggcctacgttatttcagcaatatattgaatttacgtgcttttgttggccggacaaagcgtttacgccgcatccggcatgaacaaagcacacgttgttaacaatcagaaatgccgggaataaatcccggcattttcataatcagaagttgtaacctactaccaggtaaccaccccagccggtagagcgaacgttgaagttgccgttgccgaagttcagttctgcatcgtcgttccactgaccaccgtcgtgccagtaacgagctacgacagagtagtgccagtgatcgtagttcagagccagaatatggctggaagcgatagagttattagtacgggtcttaataccgttgattgcgttaccgctgtcatcccctaaatcggaaccccagtcgaagttggtgaagccgatgtagctcagctgaccgccccacagatcggtaatcggcacaaagtatttaattttgaaacggtaaccgtcccactcgttttcgttcgctgcgccatagttctgccactggtatttcgcatagacgttcatggacaggctcatcggcaggccagtgtcgatatcggtacccagacccatgtaccaggtgctctggcgaccatctttattacgacccatgtcgtaaatgtagttgttcgcgaagtaccactctttgaacggaccgaagctaaggtcagtattggtcagcttgtcgatggagaaacgtggttcgatttccataaacagcggagaaccgtggttccagatacctttagcatcggagttaccgccgaagaataccggcgcatccgcataaccatagaagtcgaaccagtcttttttagcgaatgcttcgtactcaaggtaggtatcgttgcggatctgcggtccgaaacgggtgtgatagcttccgacaacgttaacgctctggtgccaccagtcggaaagatactgcggtttgtcgttttcagctgcgttgacagtaaaagagctagagagcgccagtaccgcaccggctgccagtaatgtttttttcatatgtatgccactgtttgaaaatcccttgcgggagtgaaaaaggcgcaaattgcgtttctaaatatttcgtatacagaggagcctattataaaaatcattgctcacaaaaatatgtttcgtttcacagttctatcatttacgtaatcgattgcgttcacgtttacacacattcgggcggggattgtactgactttcgcccttgttgcaaacttttactatcaatccaggtgatgtaagcagagtaacaaaatgacggggaaagatgttgcgggacgcacaaaatcgtcccgaaatacgtttactgcataacaggttgaatgtcgtggatacgtacaaagcctaactgatccacagaaatcccctttaactgtaacggaatatcaacatcgctgggggcgaggacgctggcaggggcattaatcaattgattctgcacattgatttcctgaaagttgtctattgttccctgaatttgcccatattcaacagttccgctgaatgcgggcaagggatcattgctctcaccctgaatacgtagtgtaagggtggtgccatctgcatcaggcgtaatattcaccaggctcatacgtaaagtaccgatctggctttccagtcttgccggtgttttcgctccaggcagaaggtaaaccccactgctggattttgcattcagcctgttttgctgagtgattttgactgtttcttgattgagttgcgtcatctcctggttcagcgtgctgacgctgtgtttcatctgtcgcacttcactttgctgcacacaggcgctaaggctgaacaggcttcccagcaggagcagtcgaaaaacgttagtattcataggtcgtccctttctcgtcgcaattagcctaatggtagagggtaaaagcagcgaaagcatcgatcctttatctcaaaagcgttgcgcctttgttgtatcgtcagttcagggtaaaatagatttccgttaaccacctggtcaggacgccgtatgcattgcccattctgtttcgccgtggacactaaggtaattgactctcgtctcgtgggcgagggtagttccgtacgccgccgtcggcagtgtctggtgtgtaatgaacgtttcaccacctttgaagtggcggagctggttatgccgcgtgttgtaaaaagcaacgacgtgcgtgaaccgtttaatgaagagaaattgcgtagcggaatgctgcgggcgctggaaaaacgtccggtgagttccgatgacgtcgaaatggcaatcaatcatattaaaagccagctgcgcgccaccggtgagcgcgaagtgccgagcaagatgattggcaatctggtgatggagcaattgaaaaagctcgataaagtcgcctatatccgttttgcctctgtctaccgcagtttcgaagatatcaaagaatttggcgaagagatcgcgcgcctggaggactaagccgtgcaggacgagtattacatggcgcgggcgctaaagctggcgcaacgaggacgttttaccacgcatcccaacccgaatgtcgggtgcgtcattgtcaaagatggcgaaattgtcggtgaaggttaccaccaacgtgcgggtgaaccacatgccgaagtacacgcgttgcgtatggcgggtgaaaaagccaaaggtgcgaccgcctatgtcacactcgaaccctgtagccatcatggtcgtacgccaccgtgctgtgacgcactcatcgccgctggcgtagcgcgcgtggttgccagcatgcaagatcctaacccgcaggtcgctgggcgtggactttaccgtctgcaacaggctggcattgacgtcagccacggcctgatgatgagtgaagccgagcaattgaataaaggctttctcaagcggatgcgcaccggctttccttatattcagttaaaacttggcgcaagccttgatggtcgcacggcgatggcgagcggcgaaagccagtggatcactagcccccaggcgcggcgtgatgtacaactactgcgcgcgcaaagtcatgccattttaaccagcagcgccacggtgctggcggatgatcctgccttaacggtgcgttggtctgaactggatgaacaaactcaggcgctctatccgcaacaaaatctccgtcagccgatacgtattgtgattgatagccaaaatcgcgtgacgccggtacatcgcattgtgcagcagcccggcgaaacctggttcgcgcgtacgcaggaagattctcgtgagtggccggaaacggtgcgtaccttgctgattccagagcataaaggtcatctggatctggttgtactgatgatgcaactgggtaaacagcaaattaacagcatctgggtggaagcggggccaacgctcgctggcgcattgctgcaggcgggtttagtcgatgagctgattgtctatatcgcacctaaactattaggcagcgacgcccgcggattatgcacgctgccagggcttgagaaattagccgacgccccccaatttaaattcaaagagatacgtcatgtaggcccggatgtttgcctgcatttagtgggtgcatgatctcccggctcgaaagggaagcagcgcacgaaatattatgctaaaatccgcccccctgcggggccatactcgaacccgaaggaagaaaatgaacattattgaagctaacgttgctaccccggacgctcgcgtcgccatcaccatcgcgcgtttcaacaactttatcaatgacagcctgctggaaggtgcaattgacgcactgaaacgtatcggtcaggtaaaagatgaaaacattaccgttgtttgggtgcctggtgcctatgagctgccgctggcggcgggtgcactggctaaaaccggtaaatacgacgcggtgattgcgctgggtacggttattcgtggtggcactgcccactttgaatatgtcgctggtggtgcaagcaacggcctggcgcatgttgcccaggacagcgaaattccggttgcttttggggttctgaccactgaaagcattgaacaagcgatcgaacgtgctggcaccaaagctggcaacaaaggtgcagaagctgcactgaccgcgcttgaaatgattaatgtattgaaagccatcaaggcctgaaattagtaaggggaaatccgtgaaacctgctgctcgtcgccgcgctcgtgagtgtgccgtccaggcgctctactcctggcagttgtcccagaacgacatcgctgatgttgaataccagttcctggctgaacaggatgtaaaagacgttgacgtcctgtacttccgtgagctgctggccggggtggcgactaataccgcatacctcgacggactgatgaagccatacctgtcccgcctgctggaagaactgggacaggtagaaaaagcagtactgcgcattgcgctgtacgaactgtctaaacgtagcgatgtgccatacaaagtggccattaacgaagcgatcgaactggcgaaaagcttcggcgcagaagacagccataagttcgtcaacggcgtactcgataaagcagcacctgtgattcgccctaacaaaaagtgatatccaggccggtagattcacggaagaccgttccatgatcgccggccttttcttttttacctgctgaggcataacgtatggcatgtggcgagttctccctgattgcccgttattttgaccgtgtaagaagttctcgtcttgatgtcgaactgggcatcggcgacgattgcgcacttctcaatatccccgagaaacagaccctggcgatcagcactgatacgctggtggcgggtaaccatttcctccctgatatcgatcctgctgatctggcttataaagcactggcggtgaacctaagcgatctggcagcgatgggggccgatccggcctggctgacgctggcattaaccttaccggacgtagacgaagcgtggcttgagtccttcagcgacagtttgtttgatcttctcaattattacgatatgcaactcattggcggcgataccacgcgtgggccattaagtatgacgttgggtatccacggctttgttccgatgggacgagccttaacgcgctctggggcgaaaccgggtgactggatctatgtgaccggtacaccgggcgatagcgccgccgggctggcgattttgcaaaaccgtttgcaggttgccgatgctaaagatgcggactacttgatcaaacgtcatctccgtccaagcccgcgtattttacaggggcaggcactgcgcgatctggcaaatagtgccatcgatctctctgacggtttgatttccgatctcgggcatatcgtgaaagccagcgactgcggcgcacgtattgacctggcattgctgccgttttctgatgcgctttctcgccatgttgaaccggaacaggcgctgcgctgggcgctctctggcggtgaagattacgagttgtgtttcactgtgccggaactgaaccgtggcgcgctggatgtggctctcggacacctgggcgtaccgtttacctgtatcgggcaaatgaccgccgatatcgaagggctttgttttattcgtgacggcgaacctgttacattagactggaaaggatatgaccattttgccacgccataaagatgtcgcgaaaagtcgcctgaagatgagtaatccgtggcatctacttgctgtcggattcggaagtggattaagcccgatcgttcctgggacgatgggcagcctggcagcgattccgttctggtatctgatgacctttttgccctggcagctctacagcctggtggtgatgctggggatctgtatcggcgtctatctttgtcatcaaacggcgaaagacatgggtgtgcacgatcatggcagcattgtctgggacgaatttattggtatgtggatcacgctcatggcgctgccgaccaatgactggcagtgggttgccgccgggtttgtgattttccgtattctggatatgtggaagccgtggccgatccgctggtttgatcgcaatgtgcatggcggcatggggatcatgatcgacgatattgtcgccggggtgatttccgcaggcatcctgtattttatcggtcatcactggccgctgggtattctgagctaattgtgcaccgatgcctgatgtgacgcttgtcacgtctcatcaggcctggactcttatttaaatcctacgacaggatgcggtttatacggcgtttccagttcggcaatctgttccggcttcaaagtgatatccaccgcgttcaatagctcatcaagctgttcttcgcggctagttccgataatcggtgcggcaatgcccggtttactcaacaaccaggccagcgcaacttgtgctcgtgtcgcccccagttcttcactgacgcctgttaaccgctctgcgatctgcgcgtcattttcatcgctttctttatagagatttttccccacctcatcagacaccagtcgtgcggtagtttctccccacggacgcgtcagacggccccttgccagcgggctccatggaattaccgccacgccctcctgataacacagtggtagcatctcgcgctcttcttcacgataaatcagattgtagtgatcctgcatactgacaaactgcgcccagccgtgctgtttttggagttccagtgcctgagcaaactggctagcgtgcatactactcgcgccgatataacgcgctttcccggcttttaccacgtcgttgagggcttccagcgtctcttcgatcggcgtgttgtaatcccagcgatgaatttgcaggatatcgacataatccatgccgagacgtcgcaggctgtcgtcgatagagcgcaaaatttgcgcacgggataatccttccggtaaatcaccaacgcgatggaacactttggtcgcaacgaccacgtcttcacgacgggcgaaatcccgcagtgcgcgaccgacgatctcttcgctgctgccgtcagaataactgttggcggtatcaaagaaatttatgccgccttccagtgcacgtttaattatgggacggctgctttcttccggcagtgtccatgcgtgattaccgcgatctggctcgccaaaggtcatacagccgaggcaaagtcgggaaacgcgaaggtcggtttttcctaaggggttgtattgcatgctgccactcctgctatactcgtcatacttcaagttgcatgtgctgcggctgcattcgttcaccccagtcacttacttatgtaagctcctggggcttcactcgtttgccgccttcctgcaactcgaattatttagagtctatgaataatttcttaagcatagcaggagtggagtagggattatgccagccaggccttgattttggcttccataccagcggcatcgaggccgagttcggcgcgcatttcttcctgagttccttgcggaataaagaagtccggcaggccaatgttcagcacgggtactggtttacgatgggccatcagcacttcgttcacgccgctgcctgcgccgcccataatggcgttttcttctacggtgaccagcgcttcatggctggcggccatttccagaattaacgcttcatcaagcggtttcacaaaacgcatatcgaccagcgtggcgttcaggctttcggcgactttcgccgcttctggcatcagcgtaccaaagttaaggatcgccagtttctcgccacgacgcttcacaatgcctttgccaattggtagtttttccagcggcgtcagttccacgccgaccgcgttgccacgcgggtagcgcaccgcactcgggccatcgttatagtgatagccggtatagagcatctggcgacattcgttttcatcgctcggggtcataatgaccatttccggtatgcagcgcaggtaagagagatcaaaagcaccctgatgggtttgaccgtcagcaccaacaatgcccgcgcggtcgatggcgaacaggaccggaagcttttgaatcgccacgtcatgcagcacctgatcataggcgcgttgcaggaaagtggagtaaatcgcgacaatgggtttgtacccaccaatcgccagacccgcagcaaaggtcaccgcgtgttgctcggcaattgccacgtcgaagtagcgatccgggaatttacgactaaactcgaccatgccggaaccttcacgcatcgccggagtaatcgccatcagcttgttgtctttcgctgccgtttcgcacaaccagtcgccaaagattttactatagctcggcaaaccgccgctacttttcggcaaacaaccgctggagggatcaaatttaggcacggcgtggaaagtgatcgggtctttttctgccggttcataaccacgaccttttttggtcatgatatgcaggaactgcgggcctttcaggtcgcgcatgttctttagcgtggtgataagccccagcacatcgtgaccgtccaccgggccgatgtagttaaagcccagctcttcaaacaacgtgccaggcactaccatgcctttaatatgttcttcggtgcgtttgagcagctctttaattggcggcacgccagagaaaacttttttcccgccttcgcgcagactagagtaaagcttaccggaaagcagctgtgccagatggttgttgagcgcgccgacattttcggaaatgctcatttcattgtcgttgagaatcaccagcatatcaggacggatatcgcccgcgtgattcatcgcttcaaacgccatgcctgcggtaatcgcgccatcgccaatgacacagacggtgcggcgatttttgccttctttttcggcagcaaccgcaataccaattccggcactgatggaggtactactatgcccgacgcttaatacgtcatattcgctttcgccgcgccacgggaacgggtgcagaccgcctttctgacggatggtgccgattttgtcgcggcgtccggtcaaaattttatgcggataagcctgatgccccacatcccaaatcaattggtcaaacggggtgttgtagacatagtgcagcgccacggtcagttcgaccgtgcccagcccggaggcgaagtgcccgctggaacggctcacgctgtcgagtaaatagcggcgcagttcgtcgcagagtttcggtaaactctctttcggcaacagtcgtaactcctgggtggagtcgaccagtgccagggtcgggtatttggcaatatcaaaactcatcaggggcctattaatacttattgtttatttattacgctggatgatgtagtccgctagcgcttccagtgcgctggtatcgagactctgttcagccagttgtttcaggctctgacgggcatcgtcgatcagatcccgggctttcttccgggcttgctcaagacccagaagtgcagggtaggtacttttaccaagttgctggtcggcaccctggcgttttcccaacgttgcagtatctcccaccacatccaggatgtcatcctgaacctggaaggcaaggccgatgctctctgcatacttgtcgagtaccggcagagcacgacgtcctttatctccggcgcttaatgcaccaaggcgaacggcggcgcgaatcaatgcgccggttttatgacgatgaatacgctcaagcgcgtccagaggtacgtgtttgccttccgcgtctaaatctaatgcctgaccaccgcacattccggcaataccactggcgctcgccagttcagaaatcatgctaattctgtcgcggtcgctcacttccggcatatcggcatcgcttaaaatgctgaacgccagcgtttgtaaagcgtcgccagcgagaatcgcgtttgcttcgccaaacttcacatggcaggttggcaaaccgcgacgcagatcgtcatcatccattgccggtaaatcatcatgaattaaactgtaagcgtggatacactcaacggcggcagcgggtgcgtccagcgtgtttgtgctaacgccgaacatatgaccggtggcataaaccaggaaaggtcgcaggcgcttaccacctaataatgcgccatactgcatggtttcgaccacgggagtgttctgaaagggcagtggggcgataaaacggctcagcgcctggttggcctgcttaacgcaggcttcgagttgctgcggaaagtccattactcattgtccggtgtaaaaggggttagagaggcgtcttcattgtcagacagcagaatttgtacgcgctgttcggcttgttgtaatttggcctgcccctgacgtgccagctgcacgccgcgttcgaactcgttcagcgcctcttccagcggcaggtcgccactttccagacgggttacaatctgttccagctcgctcagcgccttttcaaagctggcgggcgcctcatttttcttcggcataatgaatgtctgactctcaatatttttcgccccgtcatggtaacggactcagggcaaatagcaaataacgcgcaatggtaaggtgatgtgcacagcaaagcgatgttagtggtatacttccgcgcctggatgcagccgcaggtgtgggctgctgtatttttccctatacaagtcgcttaaggcttgccaacgaaccattgccgccatgaagtttatcattaaattgttcccggaaatcaccatcaaaagccaatctgtgcgcttgcgctttataaaaatccttaccgggaacattcgtaacgttttaaagcactatgatgagacgctcgctgtcgtccgccactgggataacatcgaagttcgcgcaaaagatgaaaaccagcgtctggctattcgcgacgctctgacccgtattccgggtatccaccatattctcgaagtcgaagacgtgccgtttaccgacatgcacgatattttcgagaaagcgttggttcagtatcgcgatcagctggaaggcaaaaccttctgcgtacgcgtgaagcgccgtggcaaacatgattttagcagcattgatgtggaacgttacgtcggcggcggtttaaatcagcatattgaatccgcgcgcgtgaagctgaccaatccggatgtgactgtccatctggaagtggaagacgatcgtctcctgctgattaaaggccgctacgaaggtattggcggtttcccgatcggcacccaggaagatgtgctgagcctcatttccggtggtttcgactccggtgtttccagttatatgttgatgcgtcgcggctgccgcgtgcattactgcttctttaacctcggcggcgcggcgcatgaaattggcgtgcgtcaggtggcgcattatctgtggaaccgctttggcagctcccaccgcgtgcgttttgtcgctattaatttcgaaccggtcgtcggggaaattctcgagaaaatcgacgacggtcagatgggcgttatcctcaaacgtatgatggtgcgtgccgcatctaaagtggctgaacgttacggcgtacaggcgctggtcaccggcgaagcgctcggccaggtgtccagccagacgctgaccaacctgcgcctgattgataacgtctccgacacgctgatcctgcgtccgctgatctcttacgacaaagagcacatcatcaacctggcccgccagattggcaccgaagactttgctcgcacgatgccggaatattgtggtgtgatctccaaaagcccgacggtgaaagcagttaaaagcaagattgaagcggaagaagagaagttcgacttcagcattctcgataaagtggttgaggaagcgaataacgttgatatccgcgaaatcgcccagcagaccgagcaggaagtggtggaagtggaaaccgtcaatggcttcggcccgaacgacgtgatcctcgatatccgttctatcgatgaacaggaagataagccactgaaagtcgaagggattgatgtggtttctctgccgttctataaactgagcaccaaatttggcgatctcgaccagaacaaaacctggctgctgtggtgtgagcgcggggtgatgagccgtctgcaggcgctctatctgcgcgagcagggctttaacaatgtgaaggtatatcgcccgtaatttgtggtttttacgtcgcatctggtcagatgcgacgtttgccgcatccgacattactcgtaataattataaatccctgccgccatcaccagttgacttgccacttcatgggctttttcacgcccaaccaacaggtcgataattttcagaccaaagtcgatagctgtacccggcccctggctggtcagcaattttacccgtgcatcccagacgacgcgcttgtccagccattgttcggcgggaattttgtctttcagcgtcgggaagccggtcatattaccaatcgggaagatatcgtgcggcaccagcacggtggctggcgcggcgcaaatagccgcgacgatacgcccggaacggtggaactgtttaacggtttcaaccagcagagtgctatcgcgaaaacactccgcgcctttaatgccaccaggcagcacgatcacgtcatattcgccatcagccacttcgaccagcggcgcatccgccagcagcttcacgccgcggctgcaggtaatcgccaggttaccatcgctggcgacgctggcagtggtgactttgataccgccgcgaaccagcagatcgatagtggtgacggcttcagtctcttcactaccaggggcgaggcaaaccagtgcgcttgcgctcatattcactctcctttctttttttaattaccaggggcgaggcaaaccagtgccgatgcgctcatattcactctcctttctttttaccatttcaaacaggcgggtgttttccggtacggcaatcccatgcgcgcgggcgcggcgtaagagaaaaccattgatatagtcgatttcagtgtggcgcagcgcgcggatatcctgcaacatgctgctgatattttccgctgtggcatcaatcacctgcatcacgtaatcacgcaaatcttctgcactagtatgatgcccttcgcgttcgatcaccgccgcgacttcttcgcatatctgcataatttcttgcggatgatgacgtaattcaccgttcgggcaattccagatggcagtcagtggattaatcacgcagttgactgccagcttgcgccacagctcggcgcgaatattgttatgccaggcaacgtcaggcaacacggtttgcaaaatatccgccagataactgtaatccccgtcctgttgccgtgccgggccaatatgcgtgataccgtttgccacatgaataatgacattgccgtcgcggcgggctgcatgggtggtggtgcccatcagtaatggctgctgaatgttttgcaactcttcgatggtgcccatgccgttgtgaattaacagtattggcgtagttacaggcagtgtggacgcgaggcttttgacggcatcggaaacctgccatgctttcagcgtcaccaggagcagatcgctggtggcgagaaaatcgggatcgttggcggtcaggctttcgttaaatatgctaccatctgtctcaaccagattcacgctacaataaggttgcggtacgcgcagccagccctgaacttcatgaccctgtttgcaaagtgctgtaagccataattgccctaaggcaccgcatcccaatacggtaattttcattgttcctcctcacccgcaaccactccgggtgttcaataaggctatcccttaattgtgcatgctgttgcgactatgcacaattaagggatacgtcctggtgcaggactgtcggttatttaactttgcgggtattatgcttcgcatcaaaaatgaagggagaggaaaagatgccatctttcgatattgtctctgaagttgatcttcaggaagcacgtaacgcggtcgataacgcgagccgcgaagtggagtcccgttttgacttccgtaacgttgaagccagttttgagctgaacgacgccagcaaaaccatcaaagtgttgagcgagtccgatttccaggtcaatcagttgctggatattctgcgtgccaagctgctgaagcgcggcattgaaggcagtagcctggatgtaccggagaatatcgttcatagcggtaaaacctggtttgtggaagcgaaactgaaacagggcattgagagcgcgacccagaagaaaatcgtcaagatgatcaaagacagcaaactgaaagtgcaggcgcaaattcagggcgatgaaatccgcgtaacgggcaaatctcgtgatgatttgcaggctgtcatggcgatggtacgtggtggcgatctcggtcagccgttccagttcaaaaacttccgcgattaatcgcgactatgtgcgttttgttcatgtcagatgcggcatgaacgcctgattcggcctacaaaggtttgtaattcagaaactttgtaggcctgataagcgtagcgcagcaggcaattcgccgcgttttttatgcctgacgaattgcctgttctatctcaaagcgattcgtcactttgctgtcgattttcacataagcactatgttcttcttctgcaatcaacacttctttgatgccttcagtttctagcaaacgcacttttaacgcctcgtttgcggcaatgttcgccgggatttcaatgcgcaaactgctgacatacggcggttctttcatggtactggcgactgtcagccacactgcggccagcattgcgccagcgagaaataccccctgaccgtcaaacatgccgttaatccagccgcccaggctaccgccaatcgccacgccaagaaactggctggtggagtaaacacccatcgccgtacctttgtaacctgctgggctctctttactgataagactgggcaggagggcttccatcaaattaaacgccacaaagaaaagctgcacgccgaccaccagttgccagaactgcgtttgcgcgttccacaacacaatttccgcaaccacgatcaacccgacgcagaagacaaagacttgcttcattttgcgcttaacttcagcgtagataatgaaaggcacgacgctgccaaaggcgattagcattgtcgccagatagaccttccagtgttcagccgccgggaaccctgcatcagccagttgtccgggcagggcaacaaacgtgctcatcagcaaaatatgcagacacataatgccaaagttgagtttcagcagccgcggttccgccagcactttactgaaactgcctttcaccattccggactcacgattaagtacgtgagtgctactgttgggcacaacccaaatggtcaacgcaatgccggtcgttgccagaatagcgatcatccagaacagcgcgtgcagcccaagtttgtgagtgatgatcgggccaagcaccatcgcaatggcaaaggtaatgccaaagctcacgccgataaacgccatcgctttggtgcggttttgttcgcgcgtgagatcggaaagcagcgccataacggcggcggcaattgctccagagccttgtagcgcccggcccagaataattccccagatggagtcggaaagcgcagcgataacgctaccggcggcaaacaccgccagcccaccgacaattaatggtttgcgaccaatgcggtcggaaagcaggccaaacggaatctgaaaaacggcctgagtcagaccataaataccaatggcaataccgattaatgcttcgctggcaccttgcagagccatgccgtacgtggtcagaaccggcagaaccataaacatgcccagcatgcgcaagctgaatacggtccctaaaccccaggtcgcgcgcctctcacctggcgtcattttataatcgttcattaccacctctgttttaaattcgcgactagtgtaaagcggcaaacgaatggggtaaacatgcggattttttagtaaatatttcgagagggatatgtttctaatgctaagaaaaaaggtgccgtagcacctttttaatagagaggttttgttaccacacagcagccagcagcgtatggctgtccggtaccataaaatcaacggacatcatcacgctgagggcagtgatggcgatgatagagaagccgaacagcttgcgcgcccagattctgtcatcagcaactttataaccgcgcagagccatacctaaccaccagacgctaaccgccgcggcgaccaccagatatttatacccagcgtaaccgccaagagagagcatcagcgtggcaacggcaaaggcgatgatatacagcgtgatgtgattcttcgccacgctaatgccttttaccactggcaataccggaatgtttgccgcctggtaatccttaaagcggaaaatggcgatggcataggagtgaggcatctgccacaggctgaagatagccagcaggatcgctgcgccgctatcgaactcaccggttaccgcacagtagccgatcaccggcggcgcagcgccggagaggctaccaatcaacgtgccgtagacagagtggcgtttcatgtacaggctataaacgccgacataaaccacaaagcccatcacccccagccagcaggccagcggattcgcgccaaaccacagcagcataaagccagcaatacccagcaacgtggcgtacaccaggctgacagcaggagagatcaggcctttcaccagcacccgattcttcgtcctttccatctttctgtcgatatccctgtcgatgtagttgttaaacacacaaccgctcgccacaaccagactcaccccaaccagcgtgtagataaacaggggataatcaatgctgcccttactggccagcaggaatcccccaatcacgctgatcaggttgccaaagatgatgcctggtttcgttacttgcaggtattgcttaaacatcataaccgccgctcttagtgcatcatcatgttgtagttgaggttccacataatccagatggagcctacaaccaggatagcgatgattagcacggtgaagacaaacgccgtcatgttccagccttcatcacttttggtattcatgtgcaggaagcacaccagatgcaccagaacctgtaccactgccattgccaggattgttcccagaattacggccggagaggcagctcctgtcatcaccatccagaacggaatcaccgtcagaatgatgctcaggataaagcctgtcatgtaggtttttacgctgccatgggacgcgccgctgtgatcggtagaatgactcattacatcgcccccatcagataaacaacagtgaacacacagatccaaaccacatccaggaagtgccagaacaggctcaggcacatgatgcgggtacggttagtgctggtcaggccgcgacgggcgatttgcaccatcagcaccgccatccagataagaccagaagtgacgtgcagaccgtgcgtgccgaccagcgcaaagaacgcactcaggaagccgctgcgatccggacccatgccgttaacaatcaggtgatggaattcatagatttccatcccgataaatccggcaccaaacaaccaggtcaacgccagccaggagataacctggcttttgttgtttttgtacatggcgatagccgccatgccgtaggtgatggagctgaacaacagcaagaaagtttcaaccagaacgaacggcagttcgaaaatgtccttacctgtcgggccgcctgcggtgccgttcaccagaacggcataggtagcaaacaagatagagaacagaatgcagtcgctcatcaggtagatccaaaatccgaagattttggttccgcctgcatcgtggtgcccgtgttcgtgcgcgtgggcagtcgcgtgcgtcaaagtatcagttgccatttttcagccctgccttagtaatctcatcgaaatgctggttttccagtttttcgatttctgccaccggcacgtagtaatccacgtcctcgtcgaagcttttcacgatccaggtgatgatcatgcctgcgaagccaacaatcgccagccaccagatatgccagatcatggcgaaaccgaagatggtggagaaagctgcaatgacgatacctgcaccgctgtttttcggcatatgaatttcttcatagtggtcaggctttttatacgcttcgcctttctctttcatttcccagaatgcatcacgttcgtgaacgtgcggcactacggcaaagttatagaacggaggcggggaagaggttgcccactccagcgtacggccaccccacgggtcgccagtcaggtcacggttctggtcgcggtcgcgaatagaaacgtacatctgaataacgaggcagagaatacccagcgcaatcagtactgcaccgctggctgcaatcatcagcatggtgtggaactgcgggtcaatctgctggctcaaacgacgggtcatgcccatgaagcccagcgcatacagtggcataaaggcaacgaagaagccgatgatccagaaccagaacgcgcgtttaccccaggtttcgttcagtttgaaaccgaacgctttaggccaccagtaggtcatccctgcgaagcagccgaagaccacgccgccgatgatcacgttatggaagtgcgcaatcaggaacaggctgttatgcagaacgaagtccgcgcccggtacggccagcagcacgccagtcatcccgcccacgctgaaggtgacgataaaaccgatggtccacagcatcgcagaatggaacacgatgcggccctgatacatggtgaacagccagttgaagatcttcaccccggtcgggatggcgataatcattgtggtgataccaaagaaggcgtttacgttcgcgcccgcacccatcgtaaagaagtggtgcagccaaacgatgaagctcagcacggtgatacagacggttgcccataccaggctggtataaccaaacagacgtttacggctgaaggttgccgcaatttcggagaacacaccgaaaacaggcaggatcaggatgtaaacttccgggtggccccaggcccaaatcaggttgatgtacatcatcatgttgccacccatatcgttggtaaagaaatgggtgcccagatagcgatccagggtcaacaacgcgacggtaaccgtcagaattgggaaggaagcaataatcagtacgttcgcgcacagacttgcccaggtaaatactggcatcttgaacatggtcatgcccggtgcgcgcatcttcagaatggtaacgaagaagttgataccggtaagcgtcgtacctataccggatagctggagactccatatccagtaatcgacaccgactcccggactgtactctattccgcttagcggtggataggccagccagccggtctgcgcaaattcgcccacgccgagagaaacgttaaccagaatcacaccaacaacggtaaaccagaagcttaagttgttgaggaacgggaacgcaacgtcacgcgcgccgatctgcagcggaaccaccaggttcatcagaccgataacgaaaggcatcgccacgaagaagatcataatcacgccgtgcgcggtaaagatctgatcgtagtggtgaggtggcaggaagcccgcttcgcccgcgctggcaagagcctgctggctacgcatcataatggcgtcagcaaaaccacgcagcaacatcacaatcgccacgatgatatacatgataccgaggcgtttatggtcgacggaggtcagccactctttccacaggtaggtccacttaccgaagtaagtgatcaggccaacgagcgccagacctcccaaaataatgccagcgatcgtaaccatgacgataggttcatggaacgggactgcatcaagacttaattttccgaacatctttattcttcctcaacccctttaatgggcggattccgcgtggctcatgtccatgccttccataccttcgtgtgcgctgtgctcaccttctggctgggtcatgtccatgctcttaccgtgagccataaacttgttaattacatcggcaaacaagtctggtttcacgttggagaaatattccacctggttgtattcgctaggcgcggccagtttttcgaacgcagccatgtcagacatggtgttcgggctctgcttcgcttttgcgacccactggtcgaatgcggcgcgatccggtgttgcaatagctttgaacttcatgccactgaagcccgggccgctgtagctggcggagataccgtcataagtgccgggttcgttggcgatcagatgcaggcgagtctgcataccggccatggcataaatctggctacccagacgcggaatgaagaaggagttcatcacggagttggaggtcactttgaagtacaccggagtgttcgccgggaaagcgatttcattcacggtagcaatgccctgttccgggtagatgaagaaccatttccagtccatggaaaccacttcgatggtaatgggcttctcgtcgtgtgccagcggcttgctaggctcaagagcgtgagtggttttccaggtcagtactgcaaggaagatgatgattaagataggtaccgtccagaccacagcttccactttattggagtgactccagttcgggctgtacttagcatctttattgctcgcacggtacttccaggcgaaaccaacagccatcaagattgcgggaataacgacaatcaacatcaggccaaatgccgtcagtatcagactacgttgctccagaccaatctgtcctttgggatctaacagcgcagaattacagccactgagcaatacagtgcctgcaaataaactcaaccatcccaaacttttattgtatttcctgagtctcatttaacgacctcaattccacgggatctggtggcgtttaaagtgtgtgggcattttacgggaaggttacattactgtaaacatgattaaattcctgttacttggatttggctgccaggtcacatatgttgcaaaacatatcaggttgattttaagaagctgttgcaaaagggcgttataacaaaaggggagtgctgaaggagtctgggcgggcaattggtataaccaatgtgaaataaaacaattatttaacaaataattatcattagagtgacaactgggtgatgagaaaataaagactcattagctgaatcgtgtaagaaaaatagaatttataaatggcgccaataatttccaaacgctaagccgcacaaaagaacaaatattaataagcgatactgatgtttatttagccgtaataattacggcgagtgattactacagctaaataatatttacagattacgtcagatgcgtttttcgtagcgccagataatccagcaaaccaccaagcacgacgccagaaagggcgactaaaaccccgacttccagcagagcaggcaggaaagagaagtgcgtcaaatccagcgcgtccatcgtcaatagcagtaaccacacggccaacaggctgacgcccgccgccagtgtccacatggcaaaggcataacctgccggatatgcggtacgggagataaagttgtcatttactcgtgtatattcaagcgtctggcggcaaaccagcagcaaaataagccctggtacggcagcggcgacggagaatagatagaatgtgctccagccgtgtgcttcaacaaaccaacccgccacggggccgacataaactcgccctacagcagaaagcgcactgagcagggcaaattgagtagcggaaaaactcttattacatagcgtcattaacagcgcgacaaaggcacttgtgcccatcccgccacagaggttttcgaaaaagacggctgcgcccatgctgtagagatgcttatcagtaatgctcagcagccagtaaccggcgttagacgcaccttgtaaaatgccgaaaatcagcagtgcccggaacagactcaggcgctgcatcaaaatcccaccgtacaatgcgccaacaatggtcgctagtaagccaagcgttttgttaaccacgcctacttcacccgcatcaaacccgacgccgcgaatcaaaaacgtggttgtcaggctcatggcgaatgcgtcgcccagcttatacagcacgataagaagcaaaataagccaggcattattgcgaccaaagaaatctcgcagaggtgcaacaaccgcttgttccagcgttttgggcacaggaatggtgtcggttggttctggtgcaagcaacgtcgcgataatacaggggatcaacagtgccgccattaaccagtacatgccctgccagcccagccatttatctgccagccacagggctaggccgccggaaaccagcatccctaaacggtaacccagcacgctgattgccgcgcccgcaccacgttcttctgccggaagcacatcggttttccacgcatcgaagactatatcctgggaagcagagcaaaaagcgatcaccactgccagcgccgccatccagcggagttgggtgcctggttcgagaaaacccatcgccgcaatggcgactaataacaggatttgcgtggcgagcagccaaccgcgccgccgcccaaaaaatggaggcgtgtagcggtccatcagcggactccagaggaatttaaaaacgtaagcctggcctaccagagagaagaaaccaatggttttgagatcgatattctcgaccgtcatccaggcctgtaaggtaccggatgtcagggcgagcggtagcccggaagcaaaacccaggatcagcaatatggcactacgcggctgttgaaaaatacgtaaatattgactggacatgggcgtctacaggcccggcttgcaccgggccagagggcagaaattaacgcgcgttctgcttgatgaattcgtggatgctggtgtcctgagacatatcagcgatggtatcggtcagcacactgttaaccgcatcggcgatatttttgttggaggcctggaacgcaccttcaacgttgtagctggcacgatagtttttggtcattttgttgccattctgcgcggtagcgatgatggcgatatccgctttggtcgcgatgttgtagcgcacgttgccctgggacacgtcagcatacagttggctaacgatgatttgcagattaaccgggccattcggaccaaccatgtaaccacgcgcggtcatctgtttttccagcacttcttgcagcaggaaacgcagatcgcgggaggcggtcagggtaacgatttgattatcgcgggtgacttttgccagcgcctgatcggtacgctgatcggcaccattaatgcttacggtgacgcccatcaggcttggatcctgctgtggcagtgtaatcgtcggggaaacttcaatagttgttggcggttttgcgcatcctgcaagcataaacagagcaactaacgggaagaggatttttttgaacatgttcgggctctcagagactcttaagcgtgtttggtaaaaattcccgccatcataacattgccaacggcgaggggaagtgggtaaggcatgtaaattcatcatgttgacgaaataatcgcccctggtaaaagaaacactgatgcgaggcctgtgtttcaatctttaaatcagtaaacttcatacgcttgacggaaaaaccaggacgaaacctaaatatttgttgttaagctgcaatggaaacggtaaaagcggctagtatttaaagggatggatgacatctcagcgttgtcggaggagatatttcatgatgatacgtgagcggatagaagaaaaattaagggcggcgttccaacccgtattcctcgaagtagtggatgaaagctatcgtcacaatgtcccagccggctctgaaagccattttaaagttgtgctggtcagcgatcgttttacgggtgaacgttttctgaatcgtcatcgaatgatttacagtactttagcggaggaactctctactaccgttcatgcgctggctctgcatacttacactattaaggagtgggaagggttgcaggacaccgtctttgcctctcctccctgtcgtggagcaggaagcatcgcgtaaaaacgcatttgcaactgtcggcgcttttccagtatgttgctaaagattttatgaaaaacggcctgcgggccgttttgttttgtctggattttgcgctttttgcccagcattcagacgaaaattgcccgggaattgtgaaaaaatacgcgacagcgcgcaataaccgttctcgactcataaaagtgatgccgctataatgccgcgtcctatttgaatgctttcgggatgattctggtaacagggaatgtgattgattataagaacatcccggttccgcgaagccaacaacctgtgcttgcggggtaagagttgaccgagcactgtgattttttgaggtaacaagatgcaagttagtgttgaaaccactcaaggccttggccgccgtgtaacgattactatcgctgctgacagcatcgagaccgctgttaaaagcgagctggtcaacgttgcgaaaaaagtacgtattgacggcttccgcaaaggcaaagtgccaatgaatatcgttgctcagcgttatggcgcgtctgtacgccaggacgttctgggtgacctgatgagccgtaacttcattgacgccatcattaaagaaaaaatcaatccggctggcgcaccgacttatgttccgggcgaatacaagctgggtgaagacttcacttactctgtagagtttgaagtttatccggaagttgaactgcagggtctggaagcgatcgaagttgaaaaaccgatcgttgaagtgaccgacgctgacgttgacggcatgctggatactctgcgtaaacagcaggcgacctggaaagaaaaagacggcgctgttgaagcagaagaccgcgtaaccatcgacttcaccggttctgtagacggcgaagagttcgaaggcggtaaagcgtctgatttcgtactggcgatgggccagggtcgtatgatcccgggctttgaagacggtatcaaaggccacaaagctggcgaagagttcaccatcgacgtgaccttcccggaagaataccacgcagaaaacctgaaaggtaaagcagcgaaattcgctatcaacctgaagaaagttgaagagcgtgaactgccggaactgactgcagaattcatcaaacgtttcggcgttgaagatggttccgtagaaggtctgcgcgctgaagtgcgtaaaaacatggagcgcgagctgaagagcgccatccgtaaccgcgttaagtctcaggcgatcgaaggtctggtaaaagctaacgacatcgacgtaccggctgcgctgatcgacagcgaaatcgacgttctgcgtcgccaggctgcacagcgtttcggtggcaacgaaaaacaagctctggaactgccgcgcgaactgttcgaagaacaggctaaacgccgcgtagttgttggcctgctgctgggcgaagttatccgcaccaacgagctgaaagctgacgaagagcgcgtgaaaggcctgatcgaagagatggcttctgcgtacgaagatccgaaagaagttatcgagttctacagcaaaaacaaagaactgatggacaacatgcgcaatgttgccctggaagaacaggctgttgaagctgtactggcgaaagcgaaagtgactgaaaaagaaaccactttcaacgagctgatgaaccagcaggcgtaatttacgcagcataacgcgctaaattcgcacaaaggcccgtcaccgccaggtggtgggcttttttttgtcatgaattttgcatggaaccgtgcgaaaagcctctttcggtgttagcgtaacaacaaaagattgttatgcttgaaatatggtgatgccgtacccataacacagggactagctgataatccgtccataaggttacaatcggtacagcaggttttttcaattttatccaggagacggaaatgagttacagcggcgaacgagataactttgcaccccatatggcgctggtgccgatggtcattgaacagaccagtcgcggtgagcgctcttttgatatctattctcgtctacttaaggaacgcgtcatttttctgactggccaggttgaagaccacatggctaacctgattgtggcgcagatgctgttcctggaagcggaaaacccagaaaaagatatctatctgtacattaactccccaggcggggtgatcactgccgggatgtctatctatgacaccatgcagtttatcaagcctgatgtcagcaccatctgtatgggccaggcggccagcatgggcgctttcttgctgaccgcaggggcaaaaggtaaacgtttttgcctgccgaatagccgcgtgatgattcaccaaccgttgggcggctaccagggccaggcgaccgatatcgaaattcatgcccgtgaaattctgaaagttaaagggcgcatgaatgaacttatggcgcttcatacgggtcaaagtttagaacagattgaacgtgataccgagcgcgatcgcttcctttccgcccctgaagcggtggaatacggtctggtcgatagcattctgacccatcgtaattgatgccagaggcgcaactgtgccgctatacttatccagggcggcacaacgctgtaagcggcttgcgcctgagaatggcatttgcgtcgtcgtgtgcggcacaaagaacaaagaagaggttttgacccatgacagataaacgcaaagatggcagtggcaaattgctgtattgctctttttgcggcaaaagccagcatgaagtgcgcaagctgattgccggtccatccgtgtatatctgcgacgaatgtgttgatttatgtaacgacatcattcgcgaagagattaaagaagttgcaccgcatcgtgaacgcagtgcgctaccgacgccgcatgaaattcgcaaccacctggacgattacgttatcggccaggaacaggcgaaaaaagtgctggcggtcgcggtatacaaccattacaaacgtctgcgcaacggcgataccagcaatggcgtcgagttgggcaaaagtaacattctgctgatcggtccgaccggttccggtaaaacgctgctggctgaaacgctggcgcgcctgctggatgttccgttcaccatggccgacgcgactacactgaccgaagccggttatgtgggtgaagacgttgaaaacatcattcagaagctgttgcagaaatgcgactacgatgtccagaaagcacagcgtggtattgtctacatcgatgaaatcgacaagatttctcgtaagagtgacaacccgtccattacccgagacgtttccggtgaaggcgtacagcaggcactgttgaaactgatcgaaggtacggtagctgctgttccaccgcaaggtgggcgtaaacatccgcagcaggaattcttgcaggttgatacctctaagatcctgtttatttgtggcggtgcgtttgccggtctggataaagtgatttcccaccgtgtagaaaccggctccggcattggttttggcgcgacggtaaaagcgaagtccgacaaagcaagcgaaggcgagctgctggcgcaggttgaaccggaagatctgatcaagtttggtcttatccctgagtttattggtcgtctgccggttgtcgcaacgttgaatgaactgagcgaagaagctctgattcagatcctcaaagagccgaaaaacgccctgaccaagcagtatcaggcgctgtttaatctggaaggcgtggatctggaattccgtgacgaggcgctggatgctatcgctaagaaagcgatggcgcgtaaaaccggtgcccgtggcctgcgttccatcgtagaagccgcactgctcgataccatgtacgatctgccgtccatggaagacgtcgaaaaagtggttatcgacgagagcgtaattgatggtcaaagcaaaccgttgctgatttatggcaagccggaagcgcaacaggcatctggtgaataattaaccattcccatacaattagttaaccaaaaaggggggattttatctcccctttaatttttcctctattctcggcgttgaatgtgggggaaacatccccatatactgacgtacatgttaatagatggcgtgaagcacagtcgtgtcatctgattacctggcggaaattaaactaagagagagctctatgaatcctgagcgttctgaacgcattgaaatccccgtattgccgctgcgcgatgtggtggtttatccgcacatggtcatccccttatttgtcgggcgggaaaaatctatccgttgtctggaagcggcgatggaccatgataaaaaaattatgctggtcgcgcagaaagaagctagtacggatgagccgggtgtaaacgatcttttcaccgtcgggaccgtggcctctatattgcagatgctgaaactgcctgacggcaccgtcaaagtgctggtcgaggggttacagcgcgcgcgtatttctgcgctctctgacaatggcgaacacttttctgcgaaggcggagtatctggagagcccgaccattgatgagcgggaacaggaagtgctggtgcgtactgcaatcagccagttcgaaggctacatcaagctgaacaaaaaaatcccaccagaagtgctgacgagcctgaatagcatcgacgatccggcgcgtctggcggataccattgctgcacatatgccgctgaaactggctgacaaacagtctgttctggagatgtccgacgttaacgaacgtctggaatatctgatggcaatgatggaaagcgaaatcgatctgctgcaggttgagaaacgcattcgcaaccgcgttaaaaagcagatggagaaatcccagcgtgagtactatctgaacgagcaaatgaaagctattcagaaagaactcggtgaaatggacgacgcgccggacgaaaacgaagccctgaagcgcaaaatcgacgcggcgaagatgccgaaagaggcaaaagagaaagcggaagcagagttgcagaagctgaaaatgatgtctccgatgagcgcagaagcgaccgtagtgcgtggttatatcgactggatggtacaggtgccgtggaatgcgcgtagcaaggtcaaaaaagacctgcgtcaggcgcaggaaatccttgataccgaccattatggtctggagcgcgtgaaagatcgaatccttgagtatcttgcggttcaaagccgtgtcaacaaaatcaagggaccgatcctctgcctggtagggccgccgggggtaggtaaaacctctcttggtcagtccattgccaaagccaccgggcgtaaatatgtccgtatggcgctgggcggcgtgcgtgatgaagcggaaatccgtggtcaccgccgtacttacatcggttctatgccgggtaaactgatccagaaaatggcgaaagtgggcgtgaaaaacccgctgttcctgctcgatgagatcgacaaaatgtcttctgacatgcgtggcgatccggcctctgcactgcttgaagtgctggatccagagcagaacgtagcgttcagcgaccactacctggaagtggattacgatctcagcgacgtgatgtttgtcgcgacgagcaactccatgaacattccggcaccgctgctggatcgtatggaagtgattcgcctctccggttataccgaagatgaaaaactgaacatcgccaaacgtcacctgctgccgaagcagattgaacgtaatgcactgaaaaaaggtgagctgaccgtcgacgatagcgccattatcggcattattcgttactacacccgtgaggcgggcgtgcgtggtctggagcgtgaaatctccaaactgtgtcgcaaagcggttaagcagttactgctcgataagagtttaaaacatatcgaaattaacggcgataacctgcatgactatctcggtgttcagcgtttcgactatggtcgcgcggataacgaaaaccgtgtcggtcaggtaaccggtctggcgtggacggaagtgggcggtgacttgctgaccattgaaaccgcatgtgttccgggtaaaggcaaactgacctataccggtagcctcggcgaagtgatgcaggagtccattcaggcggcgttaacggtggttcgtgcgcgtgcggaaaaactggggatcaaccctgatttttacgaaaaacgtgacatccacgtccacgtaccggaaggtgcgacgccgaaagatggtccgagtgccggtattgctatgtgcaccgcgctggtttcttgcctgaccggtaacccggttcgtgccgatgtggcaatgaccggtgagatcactctgcgtggtcaggtactgccgatcggtggtttgaaagaaaaactcctggcagcgcatcgcggcgggattaaaacagtgctaattccgttcgaaaataaacgcgatctggaagagattcctgacaacgtaattgccgatctggacattcatcctgtgaagcgcattgaggaagttctgactctggcgctgcaaaatgaaccgtctggtatgcaggttgtgactgcaaaataatgacctcgcgcaaaatgcactaataaaaacagggctggcaggctaattcgggcttgccagcctttttttgtctcgctaagttagatggcggatcgggcttgcccttattaaggggtgttgtaaggggatggctggcctgatataactgctgcgcgttcgtaccttgaaggattcaagtgcgatataaattataaagaggaagagaagagtgaataaatctcaattgatcgacaagattgctgcaggggctgatatctctaaagctgcggctggccgtgcgttagatgctattattgcttccgtaactgaatctctgaaagaaggggatgatgtagcactggtaggttttggtacttttgccgttaaagagcgtgctgcccgtactggccgcaacccgcagaccggtaaagagatcaccatcgctgctgctaaagtaccgagcttccgtgcaggtaaagcactgaaagacgcggtaaactaagcgttgtccccagtggggatgtgacgaagttcaagggcgcatctactgatgtgccttttttatttgtattcggtgactttctgcgtcttgtgggctgacaattgcccccgtttcttgtcacaataggcctttgcgcgcatcgatacgttgcgtgaggtacacagtcatctacagcggagtgttgttacaccatgatggacagcttacgcacggctgcaaacagtctcgtgctcaagattattttcggtatcattatcgtgagcttcatattgaccggcgtgagtggttacctgattggcggaggcaataactacgccgcaaaagtgaatgaccaggaaatcagccgtgggcaattcgagaacgccttcaacagcgagcgtaatcgcatgcagcaacagctgggcgatcaatactccgagctggcagcgaacgaaggctatatgaaaaccctgcgtcaacaggtgctgaatcgtctgatcgacgaggcgctgctggatcagtacgcacgtgagctgaaactgggtatcagcgatgagcaggttaaacaggcgattttcgcgaccccagccttccaggttgacggcaaatttgataacagccgctataacggtatcctcaaccagatggggatgaccgccgatcagtacgcccaggcgctgcgtaaccagctcactacccaacagctgattaacggcgttgccggtaccgattttatgctgaaaggtgaaaccgacgagctggcggcactggtcgcgcaacaacgcgtggtgcgtgaggcgactatcgatgttaacgcgctggcggcgaagcagcctgtgaccgaacaggagattgccagctactacgaacaaaacaaaaacaatttcatgacgccggaacaattccgcgtgagttacatcaagctggatgccgcaacgatgcagcaaccggttagcgatgcggatatccagagctactacgaccagcatcaggatcaattcacccagccgcagcgtacccgctacagcatcatccagaccaaaactgaagatgaagcgaaagcggtacttgatgagctgaataaaggcggtgattttgctgcattagccaaagaaaaatctgccgatattatctctgctcgtaacggcggcgatatgggttggttagaagatgccactatcccggacgaactgaaaaatgctggtctgaaagaaaaaggccaactgtctggtgtcatcaaatctagcgtcggtttcctgattgtacgtctggacgacattcagccagcgaaagtgaaaagcttagacgaagtacgtgacgacattgcggcgaaagtgaaacacgaaaaagccctcgatgcgtactacgcgctgcagcagaaagtgagcgatgcggcaagcaacgacaccgagtctctggccggtgcagagcaagctgccggcgttaaagccactcagacgggttggttcagcaaagataacctgccggaagagttgaacttcaagccggttgccgacgctatctttaacggcggtctggtaggtgaaaacggcgcgccgggcatcaactctgacatcatcaccgtagacggcgaccgcgcattcgtgctgcgcatcagcgagcacaaaccggaagcggtgaaaccgttggcagatgttcaggaacaagttaaggcattggttcagcacaacaaagctgaacaacaggcgaaagtggatgctgagaaactgctggttgatttgaaagccggcaaaggtgcggaagctatgcaggctgccggtctgaaatttggcgagccgaaaaccttaagccgttccggtcgtgacccgattagccaggcggcgtttgcactgccactgccagcgaaagacaaaccgagctacggtatggcgaccgatatgcaaggtaatgtggttctgctggcgctggatgaagtgaaacaaggtagtatgccggaagatcagaaaaaagcgatggtgcagggtatcacccagaacaacgcacaaatcgtctttgaagctctgatgagtaacctgcgtaaagaggcgaaaatcaaaattggcgatgcgctggaacagcaataatcctgaagccgcctcgcaaaaaaatgcgttgcagctgtaacaagaaaaggtcgctttcgcggccttttccatttctgaacattgccatttgtttactgttttcactgccgttaaggtgattccactgttaacaaacaaggagaaaacagtatgaaacacggaattaaagcactgctcattaccctgtccctggcctgtgccggaatgtctcatagcgcgctggcggcagcttctgtggcgaaaccgacggcggtagaaaccaaagcggaagctcctgcagcacaaagtaaagcagcagtaccggcgaaagccagtgacgaagaaggcacccgggtcagcattaataatgccagcgcggaagagctagcccgcgcgatgaatggcgttggcctgaagaaagcgcaggcgattgtcagttatcgcgaagagtacggtccgtttaaaactgtggaggatctaaagcaggtgccggggatgggcaatagcctggtggaacgtaatctggcggtattaaccctgtaattaatttgcatagtggcaattttttgccagactgaagaggtcataccagttatgacctctgtacttataacaacaacgtaaggttattgcgctatgcaaacacaaatcaaagttcgtggatatcatctcgacgtttaccagcacgtcaacaacgcccgctaccttgaatttctcgaagaagcccgctgggatgggttggaaaatagcgacagttttcagtggatgacggcccataacatcgccttcgtcgtggtcaatatcaatattaactatcgtcgcccagcggtattaagtgacctgttaactattaccagtcagttgcagcaattaaacggtaaaagcggcatcttaagccaggtcattacactggagccggaagggcaggtggtagcggatgcgcttattacgtttgtttgtattgatcttaaaacgcagaaagcattagctctggaaggggaattgcgcgaaaagctggagcagatggttaagtaaacgttttgtggtgccggatgctcaagccgcatccggcgacacccggaataattacctcaacccggttttctgcttcatcgctgccatcaccgtcggtttatcggccagataatgattcaaaccgttggcgcgtaaattacatgccgcacaatgaccgcaaccgtcgcctttaaagccgttatagcaggtcaacgtttcgttacggactaaatccagtttgccgtaataatctgccagcgcccaggtttccgctttatcaatccacatcagcggcgtttcaaaacgaatatctttcgccatgcccaaactgacggcatggtttagtgctttcacaaactcatcgcggcaatccgggtagccggagaaatccgtttcgcagacgccagtaattacggcttctgcttttacctgatacgcatatattgccgccagcgtcaggaacaaaatattacgccctgggacaaacgtattcgggataccatcggcttcaggttcataatcaggcaccggaatgctgtcacgcgtcaggctactgaccgccagctcgttgagcagggtgacatccagcaccttatgcgcgcgtgcccccagtttcagcgccagttcgcgtgccacgtcgatttctgcgcgatgccgctgaccgtaatcgaacgtcacgcaatggacttcatcatattgttgtaatgcctgcaccagacaggtggtggaatcctgacctccactgaacacaacgacagcacgtttcatagataatcctgcttgaacaataaaagcgttatggtaacgcctgcgattaacccggaccagctattcattggcttggcgcgggaagccaggcttcggtaaattcaaaccagccgcgcggtgtcagtcgcacaccgttcacgccgggaggggcactaatgcgatagtgatagttgaacagcggcgtcagcgtcgcatctgtcattaactggctaaaaaccgctttcagggcattaaatcggttttcttcatcaggcattatttgcacggcatccagtgtgctttgtagatgtgcgtatgctggagcgtcgaaaacatgtggccacagcggatcgcagcgcagccattgctccagagtatattccggtgcttcgccaattaatctgtcgcccatcatgaggtctgcgtgtgcctgtagggtcgtgtcgtcccagttttttgcgttatgaaaaataattgtgagttcacagccttccgctgccagtgtcgcctgtaggcgttctgccatggtatgaagttctatcggtaggtgataaaccagcgtcaaggttttcggtagtttgacttcatccggtacctgccaatgcggaatagtccagcctggcagtaatgcatgactggcggtgatcaggttttctccgacttctaacgtttgtaataaaccggattgatgaataatggagatcacttttcgcgcctgccagagggagagtcggggacttttgcgcaacgtcaaatagcaaaaacctaaactgatgccgctactgacctggctgacccgttgcagctcctccggtttgccgatggtgatttgcacgggatgccgacaactggttcccaaatctttttcgaaaagcggcggagttatccagtactcaaccgctttaagcagcggatgacgtaaatggtaataatcatggctttccaggcgcaccagctctgctgtgaattgtgttaagcgaaaaggacccgtgccgatcagtgggaattgcggatgcgccagatggctgcaatagctcgccagccggtgcgcaagccagtaatcagggcgatgtaaaaagaaggtcagacactgcggatgggtgacttcaatacgcttcacgctaataaataattgatccagtgctggcagttgtaacagcatcaataatcgctggtgtaagtgactggcttttactgcatcgccgttatgccagtgtagggtactacgaagataaaagtcccagcgtaacccgtcagtagaggtttcccagtgatgcgctaaatcgccaatcgggcgctgagtattattatcgaagcgggtcaggccggaaaatatctgcccggcgagatgctgctcggcacggccgggcaaaaagcctggttgtagcggttcgagcgggcgatagtagggaatacgcaacgtgggtgtatcgttttgccattgtccgcccataaacggctgtaacagagtgcgcagctcacctggggccagttgcgccagctccagcacatcttgctgctttccggtttccagtgcctgttccatcatcgcattgcgtaggctttccggcgtgaccagaaagcgtaattgtccgcgctttccgcgtccactctgcgcctgccactccagccatcccgcctcctgtgcctgacgcaacagcgtacgaacatggcgttcgctgcaaaaacagcgttcggccagttcgctgacggtgacggtttgcggctttccggcggaaggttgccacagacgttgatactggttaagacggttgagcaatcgcatataaacccggaacaatattatttaactattcactattacttccgtatatatcaggtgatactcaatcaccattaaccgtgtcacagagtggagaaagaaatggctcgtctggcagcatttgatatggatggcactttattgatgcccgaccatcatttaggtgagaaaaccctctctactttggcgcgactgcgtgaacgcgacattaccctcacttttgccacggggcgtcatgcgctggagatgcagcatattctcggggcgctaagcctggatgcgtatttgattaccggcaacggaacgcgcgtgcattctctggaaggtgaacttttacatcgtgatgatttacctgcggatgtcgcggagctggtgctgtatcagcaatgggatacccgagccagcatgcatatcttcaatgacgacggttggtttaccgggaaagagatccctgcgttgttgcaggcatttgtctatagcggttttcgttatcagataatcgatgtcaaaaaaatgccactcggcagcgtcaccaagatctgcttctgtggcgatcacgacgatcttacacgcttgcagatccagctatacgaagcattaggcgagcgtgcacatttgtgtttttccgccacggattgcctcgaagtgctgccggtgggctgcaataaaggcgctgcattgacggtgctgacccaacatttaggtttaagcttgcgcgattgcatggcctttggtgatgcgatgaacgatcgcgaaatgttagtcagcgtcggtagcggatttattatgggcaatgcgatgccgcaactgcgcgcggagctcccgcatttaccggtgattggacattgccgaaatcaggctgtctctcactatttgacgcactggctggactatccacatctaccttattcccccgaataacgagatcccttccagcaccgggcaattgcccggttttttttgcgttgaatttgtcattttgtgccgtggtgtttaaaccgcacagaataaattgtcgtgatttcacctttaaaataaaattaaaagagaaaaaaattctctgtggaagggctatgttagataaaattgaccgtaagctgctggccttactgcagcaggattgcaccctctctttgcaggcactggctgaagccgttaatctgacaaccaccccttgctggaagcgcctgaaacggctggaggacgacggtatccttatcggcaaagtcgccctgctggatccggaaaaaataggcctcggcctgaccgcttttgtgctgataaaaacgcaacatcacagcagcgaatggtattgccgctttgtcacggtggttaccgaaatgccagaagtgctggggttctggcgcatggctggtgaatacgattatctgatgcgcgtccaggttgccgacatgaaacgctacgacgagttttataagcgtctggtaaacagcgtgccggggctgagcgacgtcacttccagcttcgcgatggaacagattaaatacaccacttctttacccatcgaataaatatccagaatcaggtcaggacacaacgcgtgcgattatttgctcaattaagctggtatttccgtcgggaatggcgtcgctatctcggggctgtcgccttgcttgtcattatcgcgatgctgcaactggttccgccaaaagtggttggtattgttgtcgatggcgtgacagaacaacactttactaccgggcagatcctgatgtggatcgccaccatggtgctgattgccgttgtggtttatctcctgcgttacgtctggcgggtattgctgtttggtgcgtcttatcaactggctgttgaactgcgtgaagattattaccgtcagctaagccggcagcatcctgagttttacctgcgtcatcgcaccggtgacctcatggctcgtgcgaccaatgacgtcgatcgcgtcgtgtttgccgccggagaaggggtgctgacgctggtggatagtctggtgatgggctgcgctgtgttgattatgatgtctacgcaaattagctggcagttgaccttattttccctgttgccgatgccagtgatggcgatcatgattaagcgcaacggcgatgctttgcatgaacgctttaagctggcacaggcggcgttttccagtcttaatgaccgcacccaggaaagcctcaccagtatccgcatgatcaaagcctttggtctggaagatcgccagagcgcgttatttgccgcggatgccgaagataccggcaaaaaaaacatgcgggtggcgcgtattgatgctcgtttcgacccgaccatctatatcgcgattggtatggcgaacttgctggcgattggcggcggtagttggatggtggtgcagggcagtttaacgctgggccagctcaccagttttatgatgtatttaggtctgatgatttggccaatgctggcgctggcatggatgtttaacattgtggaacgtggtagtgctgcgtacagccgtattcgcgcgatgctggcggaagcgccggtggtgaacgatggtagcgaacccgtgccggaagggcgtggcgaactggatgtaaatattcaccagttcacgtatccgcagactgaccatcctgcgctggaaaacgtcaatttcgccctgaaacccggtcagatgctgggtatctgcgggccgactggttccggcaaaagtaccctgttgagcctcattcagcgtcatttcgacgtcagcgagggggatattcgctttcatgatattcctctgacgaagttacaactcgatagctggcgtagccgcctggcggtagttagccagacgccattccttttttctgacactgtggcgaataacatcgcgctgggttgcccgaatgccacccagcaagagattgagcatgtcgcgcggttagccagcgtacatgacgatattttgcgtctaccgcaaggttacgatacagaggtgggcgagcgcggtgtgatgctttccggcgggcaaaaacagcgtatctccattgctcgtgcgttattagtcaacgcggaaatcctcatccttgatgatgcgcttagcgcggtggacggacgcactgagcaccagatcctgcataacctgcgtcagtgggggcagggaagaacggtaatcatcagtgcccatcgcctttctgcactgacggaagccagtgaaattattgtgatgcagcacggacatatcgcccagcgtggcaatcatgatgtgctggcacaacaaagcggctggtatcgcgatatgtatcgctatcaacaactggaggcggcgctcgacgacgctccggaaaatcgcgaggaggccgtcgatgcgtaactaaaaatcgcgaggaggccgtcgatgcgtagttttagccaactgtggccgactctcaagcgcctgttagcgtacggtagcccgtggcgtaaaccgctggggattgcggtcctgatgatgtgggttgcggcggcggcagaagtcagtgggccgctgcttatcagctattttatcgacaatatggtagcgaaaaataacctgccgttgaaagtggttgcagggctggctgcggcgtatgttgggctgcaactgtttgccgccgggctacattacgcgcagagcctgctgtttaatcgggcggcagtaggcgtagtgcaacagttgcgtaccgacgtgatggatgctgcgttacgccagccattaagcgagtttgatacccaacccgtcgggcaggtgatttcccgcgtcactaatgacactgaagtgatccgcgatctctacgttaccgtagtggcaactgtcctgcgcagtgccgcgctggtgggcgcgatgctggtggcgatgttcagcctcgactggcgaatggcactggtggcgataatgattttcccggtggtgctggtggtaatggtgatataccagcgttacagcacgccgattgtccgtcgtgtgcgcgcctatttggcggatatcaacgacggctttaacgaaatcatcaatggcatgagcgttatccagcagtttcgtcagcaggcgcgatttggcgaacgtatgggggaggccagtcgtagtcactatatggcgaggatgcaaaccctgcgcctcgacggttttctgctgcgtccgctgctgagtctgtttagtagcctcattctttgtggcttgttgatgctgtttggcttctccgccagcggcaccattgaagtgggcgtgctgtatgcgtttatcagctatcttgggcgacttaacgaaccattaatcgaactgaccacgcaacaggcgatgctgcaacaggctgttgttgctggtgagcgcgtgtttgaactgatggacggaccgcgccagcaatatggcaatgatgatcgcccgttacagagtggcaccatcgaagtcgataacgtgagttttgcttatcgcgatgacaatctggtgctaaagaacattaatctctctgtgcctagccgcaattttgtggcgctggtcgggcataccggcagtggcaaaagcaccctcgccagtttattgatgggctattacccgctaacggaaggtgagattcgccttgatggtcgtccattaagtagcctaagtcacagcgcgctgcgccagggcgtggcaatggtgcagcaagatccggtggtgctggcggataccttcctcgccaacgtgacgctggggcgggatatctccgaagaacgcgtctggcaggcgctggaaaccgtgcaactggcggagctggcgcgtagcatgagcgacggtatttacacgccgctgggcgagcaggggaataatctcagtgttgggcaaaagcaactgctggcactggcgcgcgtgctggtcgagacgccgcaaatcctgatccttgatgaggcaaccgccagcattgactccggtactgaacaggcgattcaacatgctctggcggcggtgcgtgaacataccacgctggtagtgattgctcaccgcttaagcaccattgttgatgccgacaccattctggtgcttcatcgtgggcaagccgtggagcagggcactcaccagcaactgctggcggcccagggacgctactggcagatgtatcaactgcaacttgcgggcgaagagctggcagccagcgtgcgtgaagaggaaagtttgagcgcctgaatagcgcaatatttcatcgttggtgcaaaaatgtaacgcactgtgcactgtcatagtgcgttttcattttcaaacttcttaacttcctgctctctttctcgtttttcatttctggcacaccgcttgcaataccttcttcgtgtagcagaaccattaccgaattctgaccggaggggatctatgaagctggtgaccgtgataatcaaaccattcaagctggaagacgttcgtgaagcgttatcttccattggtattcagggcctgaccgtcaccgaagtgaaaggtttcgggcgtcagaaagggcatgccgagctgtaccggggggcggaatacagcgtcaatttcctgccaaaagtaaaaattgatgtggcgattgctgatgaccaactcgatgaagtgatcgatatcgtcagtaaggcggcttacaccggaaaaattggcgacggcaaaatcttcgtcgctgaattgcaacgcgtcattcgtattcgtaccggcgaagccgacgaagcggcgctgtaatctctggcacacagcaacaggaacgaaaaatgaagatagcgacgataaaaactgggcttgctagtctggcgatgcttccgggactggtaatggctgcacctgcggtggccgataaagccgacaatgcgtttatgatgatttgtactgcgctggtgctgtttatgactattccggggattgccctgttttacggtgggttgattcgcggcaaaaacgtgctgagcatgctgacgcaggtgacggtgacatttgcactggtctgtattctctgggtggtttacggttacagcctggcgtttggtgagggcaacaacttcttcggcaacattaactggttgatgctgaaaaacatcgaactgacggcggtgatgggcagcatttatcagtatatccacgtggcgtttcagggaagctttgcctgcattaccgtcggcttgatagttggggcgctggcggaacgaatccgcttcagtgctgtgttgattttcgtggtggtatggctgacgctctcttacattccgattgcgcatatggtgtggggcggtggtttgctggcttctcacggtgcgctggatttcgcgggtggcaccgtggtgcacattaacgccgcaatcgccggtctggtgggcgcgtatctgataggaaaacgcgtgggcttcggtaaagaggcgtttaaaccgcacaacctgccgatggtcttcaccgggactgccattctctatatcggttggtttggctttaacgccgggagtgcgggcacggcgaatgaaatcgcggcactggcatttgtgaatactgtggtcgcaacggcggcggcaattcttggctggatcttcggtgaatgggcgctgcgtggtaagcctagtctgctgggggcgtgttctggcgcgattgccggtctggtcggcgtgacgccagcctgcggctacattggggttggcggcgcgttgattatcggcgtggtagctggtctggcgggcttgtggggcgttaccatgctcaaacgcttgctgcgggtggatgatccctgcgatgtcttcggtgtgcacggcgtttgtggcattgtcggctgtatcatgaccgggatttttgccgccagcagcctgggcggcgtgggcttcgctgaaggtgtgacgatgggccatcagttgctggtacagctggaaagcatcgccattacgatcgtctggtccggtgttgtggcatttatcggctacaaattggcggatctgacggttggtctgcgtgtaccggaagagcaggagcgagaagggctggatgtcaacagccacggcgagaatgcctataacgcgtaacaagcactgcaaaaaacagccggacggttttcacctccggctatttttttaattgtgattacgcatcaccccttcctgaacggtgctggcaaccagtacgccgtcttgggtataaaactcaccgcgcacaaagccacgtgcgctggacgcgctggtgctctccacgctatacagcagccattcattcaaattaaacgggcgatggaaccacatggaatggtcaatggtggcaatctgaatccccggttcgagaaaaccgatgccgtgcggctgtagagctaccggcaggaagttaagatcagaagcgtaaccgagcagatactgatgaacgcgcaggtcatccggcacgctaccatttgcgcggatccacacctgacgatgtggttctgcgacgtgacctttcagtgggttatgaaactccaccggacggacttccagcggacgatcgcagatgaatttatctttcagcactggcggcagcaggtgcgccaggctttgggcgatttgcgtttcgctagggaggccatcaggcgctggcgcggacggcattgttttttgatgttcgaaacccgcttctggtgcctggaaagaggcagtcatataaaaaatcggtttgccgttttgaatagcagcaacccggcgggcgctgaagctgttaccgtcacgcagcgtttcgacatcataaataatcggcttcttactatcgccagggcgaagaaagtagctgtgaaagctatgtaccagccgctcttcagggacggtctcttttgcagcatacaaggcctgacccacgacctggccgccaaacacctggcgtaaacctaaatcttcactctggccgcgaaagagtccttcctcaattttttccagatttaacaatgtcagtaaattttttagcgcctgactcatataactctccagtaacaaagctgccgcagcaagccaaagtgagttgagtataacgcaaatttgctactggtccgatgggtgcaatggtctgaattacgggctaattacaggcagaaatgcgtgatgtgtgccacacttgttgacgttactattttgttaaccactcttccggcgaggaaagttagcccgctggtgcattgataataaggagaaatgaatgaaactcgtgcacatggccagtggtttagcggttgcgattgcgttggcggcttgcgcagataaaagcgcggatattcagacgccagcaccggctgcaaatacgtctattagtgcaacacaacaaccagctatccagcaaccgaatgtctccggtaccgtctggatccgtcagaaagtcgcactgccgcctgatgctgtgctgaccgtgacactttctgacgcgagcttagccgatgcaccgagtaaagtgctggcgcagaaagcggtgcgtactgaaggtaaacagagtccattcagctttgttctgagttttaacccggcagatgttcagccgaacgcgcgtattctgttgagtgcggcgattaccgtgaatgacaaactggtatttatcaccgataccgttcagccggtgatcaaccagggcggaactaaagccgacctgacattggtgccggtacagcaaaccgccgtgccggttcaggccagcggtggcgcaacgactaccgtacctagcactagtccaactcaggtgaatccgtctagcgcagttccagctcctacgcaatattaagcgacgttaaccctctccgcccggagagggttagtagttccagcgataacgctgcaagtcgatttgcccgcttccgcttaccatcacaccttctgccagtaatgcctgtcgctgacgctgtaaatccggtccggttaggctaattgtgccgtggcgattaaccacccggtgccagggtaaggtgctgccttcagggagacgctttaacacaccgcccacctggcgcgcggcgcgggggcttcccgccagtttcgccacatcaccgtaagtggtgacatagccttcgggaatagcggcgacgatttgccagacgcgttggggaaaactatcttctttttccatcttttcttcctgaggtaatttttcagcataatctggaaaaacgccgctgtgaagtcgcattgcgcaagaaaccagcatctggcacgcgatgggttgcaattagccggggcagcagtgataatgcgcctgcgcgttggttctcaacgctctcaatgggggctctgttggttctcccgcaacgctactctgtttaccaggtcaggtccggaaggaagcagccaaggcagatgacgcgtgtgccgggatgtagctggcagggcccccacccatttctgcctcccaccgtttcgtcaaaaaatcccaacatggctaaactttaaccacaactgacgtcgcaagaattgtctggctgcgcagtacgcttcggaggtatgtctgatgaagtatgttgatggttttgtggttgccgttcctgccgataaaaaggatgcctatcgggaaatggccgctaaggctgcgccattgtttaaagagtttggcgcgcttcgtattgtcgaatgctgggccagcgatgtaccggatggcaaagtgaccgattttcgtatggcggtgaaagcggaagagaatgaagaggttgtctttagctggattgaataccctagtaaagaggtccgcgacgctgctaatcaaaagatgatgagcgacccacggatgaaagagttcggcgagtccatgccgtttgacggcaagcgaatgatctatggcggattcgagagtatcatcgacgaataagtagcgtgacgggctgtgcggcgtgccgtcagcccaaaaattcacaaatgttgctcggcccagcgtaagaaatcttctttcggtaatgccttgctgtagagccagccctgaccgtagtgcacgccatgctggcgtaaccactcttcttgtttactggtttcgattccctccgctaccattttcagtttcagtgtttttgccatttcgatgatatgcggcgtgacatttttatattccagcgcatcaacgaaagatttatcgatcttcagaatgtcgacatccagatcctgtaaataacttaaactactataccccgtaccaaaatcatcaagataaatttcatggcccgcctcccggtagcgagaaattatcggggcgctggttttcggatcggcaaactcgcgttcagtgagttcaagcgcgatctgtctgggattaacctgatagtgattgatcatgtcacgcagcaattgcgggattttttcgctggtgagcacgggggattcaagattgatgctaatatgctgctgtggatgctgacgcagccagtcgcccatatcttcaaagacgcttcttataatcagtagcgtcaatggctcagaaaggcccgtttgctgtgccagcggaataaaactatctggactcaaccaactaccgtctgtctgcggccagcgcgccagtgcctcagcaccgacaattttgccattggctaaggagacaatcggctgatagtgcacgcaaatatcacgattttcgatagcatcctgcagccgatgatgcggactctgaatacggcgcaaaatacgcagcacaaacatcgctgccagcaggccaatcaccaacccgagcggtaaccaaataaagacttgccgatgccagcctttctgcaacattttcgtactagcccatgtgatgatgctaatattcatctccggtaagggcaggatatcgtaaatgattccattattttcgatatgctcaccgggtgttttttgtagcctggtaataattccctgagcaatttcatcgctgctggttatgacaacgttatgggcattgccaataatggcggcatcaatttgccaactgctatagggaatgacatcaataaaggaagcggggtcgatcatgacgacataatgtgccgttcccatggcgaccatgtaacggataatgcctaaatcgttatggcttgttaaccagacacgataaccatctttgctaattttacctggctcggggaaggtatcgggcggactttcatgctccagagagctacactggggaacgttgttatcgatataagccacttcctgaatatagcgataactgtaagatacccgacgcatttccatgagatgggcttcgctacaggcagcgccttgccatctttccagctcctgcagcgcatctttcccttgtgtcgccaccttattggctcgaatagcgacgcgggaggaataggtatccagctcttcaataaagcttgtttctacctgctgatgggccagccagatgcttaagccgacaggcagcaatacactaagaatcagtactccgctaataaggccgaccagatgtcgtgttctcaccagcatatccttattaacacagtgtagggaaagtatatctgattgtggaaaaaggctggctggagataaggaggtagagctggtatttcatgaagtgatgggtggaaacgatcattgtcatttgaccaggcgcagagctttacgcctggtatgtaaccctaacttaagatgtactttcggcgcgagcgagggtaaaaatatcgtaaaaagacagttcacctttacggacgatcattttttgcagttgttccttatgaacatccgcgacacgcggagagttcaagatggcttcaaccagcgcggcaggtacaaagcgcgtgttgtaccattcgccgttatagcaaacgcggaaatccagcacgtcgatatcttcatagcggtagcgtgggtagacatcgaaaaagaagaaaccattaagcaggataaataatacaaccagtagccagacagagccactcagcgtttcggactgcaacatcaccgccagggtggcaaaaaaagcaacgtacataccgataaacagccccggatgtttacggataaaactgatactaaagcggggtttgttgtcgcgtttttcgcgggtattcagagactcaatcgtttcggtcagcaggcgttgtatttcggtcatcgtttgccttcgtggtatctgcaactttccagggaacaccctattttaacgtgggaatagtagaggggaagtaacagatctaccacaattttgcataacagttgcgaaaaaccgattacaattttttaattattctggctggattaccgcccacgacaacgttgtccgggacatcttttgtgacaactgcaccactggctaccacgacgttatcaccaatggtcacaccagggttaatgaccgcgcgtccgccaatccagacgttattaccgatggtgacgggtttccccagttcagcaccgctattacgtgctacagggtcgatgggatgtgttgccgtgtagatatgaacgcctggtgccaacatacagttatcaccgatgcgaatagggcagacatcaagcatcacgcaatcgaagttggcgaaaaaattattaccgagaaaaatgttatagccatagtcacagcgaaacgttggctcaatataagcctctgtcacctgaccgaatagatcagcgagaatttgctggcgtaatgtgtgctcttccgccagggaatgattgtatcggtgaataagctgacgagcgcgcaggcgatcgcgagataacgtctcatctgcgctgcgatacaactcaccagcaatcatcttttctttttctgtgctcattactgacctccggttgctgaaaatgcggcaacacagtaagacgaaaagtcagtgaagagaacgttcccattacatctgtgtgataaagatcacatagggtatgtcttcatggcgaaaaagtataaaattcttaataaacagccggttatagctccgaaagcgaattatttattagcgaataaatttccatacactggaagggatcttgtcgtacagtttattcatggtcaattcggcgaggcggtgatctgcggcactgtaaaataccgccagttcattatcacttaattcgtatttatttttctcgataacacgctccagcgtgtcaattgtctggcaacgacgtaaacgcattaaataatcggttttcgttaaaggtttttcggacatacttctacctatggttgtaataattttaacaagataaactcgcaggattctctttcgtcgcattgacaaaacaacggaatagtcgattaccactcttccgccatttctgaagatcctgcatattaataccataactactgaacaacataaaggtgtcatccagatattcgtcgatctgctcaatgagcttattgtcttcattatacttaattttgtaattaagtgcgaaggtcgcaatatgctcaatcagttcattcaactggaggttgatcgcgctggttgggtcgtttacccagccatgattgctttcttcaaggtttgcaaggcagtcatgatacagggtttcacagagaaacttaagctgtgcgatatcatgtcttttgggactgtattcatccataacgcgtccccttcttagcggttgaactaacggacacctttcgggatggaaaaaacttactgacctggacttgccctctcgtttgttagcttaactataagccactctttgcaggttttcatcgcattattacgaaaaattacaattaggaaggaagcgggacaggactcactttttcatactagcactaacccgcagcaggtaaaagcagtttgctcgaactattcataacatttcaggattatcgccagatgaaattggtgacactaataccaggattgctctgaatatgacgtaataaccgaggaatgaataaagaattaccgcaaataattaagaatagcctctaaatgattatggattattaaatctattagcgctacttaatataaattaactaacaatcagtattttttatgaattttatccgtggttaatactggttttcgtatgagatcctgagttggtggttcaattactccttaatgttcgtaggttatgcataaaaaaggccgcttacgcggccttagtgattacacgttgtatcaatgatgatcgacagtatggctgtgctcgatatcttcattcttgcggctaaagcggcggcgaaccaccacaaagaataccggaacgaagaagattgccagtaccgttgcggtcaccatcccgcccattacaccggtacctactgcgttctgcgcgccggaaccagcaccagtactgataaccagcggcataacgccgaggataaacgccaggctggtcatcaggatcggacgtaaacgcatccgcaccgcatcaagcgtcgcttcaatcagacctttaccttctttatccatcaagtctttggcgaattcgacgataaggatcgcgttcttcgcgctcaacccaatggttgtgagcaggcctacctggaagtaaacgtcattggtcaggccacggaaggtggcagccagcaacgcaccgataacccccagcggaacgaccagcataacggagaacggaatgctccagctctcgtacagcgccgccagacacaggaacacgacaatcaagctaatcgcgtacagactaggtgcctggttgccggagagacgttcctgataggacatccccgtccagtcatagccaacaccggtaggcagtttgctcgccagttgttccatcagctccattgcttcaccggtacttttacccggtgccgcctggcctaagatttccatggatggcaggccgttgtaacgttccagacgcgggctaccgtactcccaacgagaagaggagaacgcgctgaatggcaccatctgaccatcagcagcacgaacataccagtcgccgatatcatccggcagcatacggtatttcgcttcactcatgacataaactttcttcacacgaccgcggtcgataaagtcgttcacatagctgccgccccatgcagcgcccagagtggtgttaatgtcgttgatagaaacacccagcgcctgcgctttttcctggtcgatatcaatcttaaactgcggggtatcttccagaccgtttggacgtacgctggtcaacatatcagggtgcttcgctgcttctgcaagcaactggttacgcgcctgagtcagtttttcgtgaccaaggccagcctggtcaatcagctcaaagtcaaagccggttgcagtacccagttccacgattgcgggcaggttaaaggcgaaaaccatcgcatctttgatttggctgaaagcgcgtgttgcacgcatggtaatcgcttcaactttgttttcttcgcccggacgatcggcccagtccttcaaggaaacgaacgcaataccggtattctgaccacgtcccgcaaagccgaagccgttaacggcgaacacgctctcaacgttgttcttttctttggtcagatagtaatgcgttacctcattgagcactttctgtgtacgttcctgcgttgcacctgctggcagctgaaccatggtcataaacacgccctggtcctcatctggcaagaaggagcttggcagacgcacgaacagataggccatgccgaccacgatgatcagatacagcaccaggtaacgccccgtactgcgcagaataccgcctacgctgtcggtgtagtggtgcgtgctcttctcgaacatgcggttaaaccagccgaagaagccttttttaccttccccgtgatcgcctttggcaatcggtttcagcatggtggcacaaagagctggagtcaggatcaacgccaccagtacgctcagcgccattgcactaacaatggtaatagagaactgacgatagatagcaccagtagaaccgccaaagaaggccatcggtacgaataccgcgctcagtaccatcgcgataccgaccagagcgccctgaatctgccccatgctcttacgggtagcttcttttggcggcaaaccttcttccgccataacacgctcaacgttttctaccacaacgatggcgtcatccaccaacaggccgatggcgagcaccatcccgaacattgttagcgtgtttatgctgaagccaaaggcggcaaggacggcaaaggtcccgagcaataccaccggtacggcaatggtcggaatcaacgtcgcgcggaagttctgcaggaacagatacataaccaggaacacgaggatgatcgcttcgaccagcgttttaaccacttcgtgaatagagattttcacgaacggcgtggtgtcgtatgggtaaacaattttcagaccgctcgggaagaacggttccatcttcgccagttcagcacggattgccgcagcggtatccagcgcgtttgcaccggtcgccagcttgatccccagaccggaagccggttggccgttaaactctgcgatgatgtcgtagttctcaccacccagctcaatcttcgcgacgtcacgcagcagcacgcgggaaccatcctgattcactttcagcaggattttgccgaactcttcagtagaggtcagacgcgtctgagcaataatagaggcgttaagctgttggcctttcaccggcggcgtaccaccgagctgacccgccgcaacctgggcgttctgcgctttgatggcggtaatgacatcaaccggcgttagctggaatttgttcagctcattcgggttcatccagatacgcatcgcgtactgactaccgaacaactgaacatcacccacgccgctcgtacggctgatggcatctttcatattcgccgccacgtagtcggagatatcctcctgcgtcatggtgccatcggtgttgataacgccgacaaccatcaggaagctgctggaacttttctcaacgctcaccccttgctgctgaacttcttgcggcagcaacggcatcgccagctgcagtttgttctgcacctgaacctgcgcgatatccgcatcagtaccagactcaaaggtcagggtgatctgcacggtacccgtggagtcactgttagaggacatgtacatcaggttatcgataccgttcatattctgttcgataacctgtgtcaccgtgtcctgcactgttttcgcatcagcgccggggtaggaggcggagatcgttactgccggcggtgcaatcgtaggatattgcgccaccggcagtttgaggatcgccagcccccctgccaacatgatgataatggcgatcacccacgcaaaaatcgggcgatcgataaagaaattaggcatgtcttaacggctcctgtttaagttaagacttggactgttcaggctgagcaccgcttgcggcttgctggttattatcagcggtaacttcttgtgcttttacctggacaccaggacgcactttctgcagcccacttattactacgcgatcgcctgctttcagaccttctgtcaccagccacttatcgccaatagcctggcttgcaacgatcggacgggtttccactttgtcatccgcgccaactaccagtacggtggcatcgccacgcggcgtacgggttacgccctgttgcgggactaaaatagcgtttggattaagcccttcttccagacgtgcgcgcacgaacatacccggcagcagagtgtgatccgggttcgggaagatagcgcgtagggtgatagacccagtggtctgatcaacggtaacgtcagagaattccagcgtaccgtcctgcgggaacttaatgccgtcactggtgatcagactcactttggctttgccgttctcttgtttcagcgtgccattcgccagttcctgtttcaggcgcaggaagtcgttgctggactgggtcacatcaacgtagatcggatcaagttgctgcacggttgccagcgcagtcgcctgaccgttctgtaccaatgcgccttccgtcacgttgctcttaccaatgcgaccgctaatcggagaggtgactttggtgtaagccagattgatccgcgcagtttcaacggcagctttcgccgcagttaccgcagcattcgcctgttgcgcatcagccagagcctgatcgtactcttgcttactgatgtactgagtaccgagcagtttctgataacgattcaccgtcaattgcgcgatattggctgcagcctgggctttcgccagatcacctttcgcactgtcgtatgtcgcctgataggtcgcaggatcaatctgatagagagagacacctgcttcgatgtcgctaccttctttgaaattacgcttcaggataatcccgctaacttgaggacgaacttctgcgatccggtaggcactggtgcgacccggaagctcggttgtgatctgcagaggttcagttttgactgttactacgccaacggcgggcatctgctggccaccttgttgggcctgtttgtcgtcacatcctgttagggctaagctgccactgagcatcagaacgaccgccagaggcgtaaaccctctgtttttgttcatatgtaaacctcgagtgtccgatttcaaattggtcaatggtcaaaagttaataaacccattgctgcgtttatattatcgtcgtgctatggtacatacattcacaaatgtatgtaaatctaacgcctgtaaattcacgaacatatggcacgaaaaaccaaacaagaagcgcaagaaacgcgccaacacatcctcgatgtggctctacgtcttttcagtcagcagggggtaagttccaccagcctgggcgagattgcaaaagcagctggcgttacgcgcggtgcaatctactggcattttaaagacaagagcgatttgttcagtgagatctgggaactgagtgaatccaatattggtgaactagagcttgagtatcaggcaaaattccctggcgatccactcagtgtattaagagagatattaattcatgttcttgaatccacggtgacagaagaacggcgtcgattattgatggagattatattccacaaatgcgaatttgtcggagaaatggctgttgtgcaacaggcacaacgtaatctctgtctggaaagttatgaccgtatagaacaaacgttaaaacattgtattgaagcgaaaatgttgcctgcggatttaatgacgcgtcgcgcagcaattattatgcgcggctatatttccggcctgatggaaaactggctctttgccccgcaatcttttgatcttaaaaaagaagcccgcgattacgttgccatcttactggagatgtatctcctgtgccccacgcttcgtaatcctgccactaacgaataaccctgaatctgactccaggatttttcctggacattttcgtcgttgctattctggttcactgcgtcgtgatattcttgcggtttgactttttcaggtcgttcttcaggttcagaaaccttcattcatcatgactatgttccagtattacaaacgaagtcggcattttgtttttagtgcatttattgcttttgtttttgtcttgttatgccagaacacggcgtttgcgcgggcgagtagcaatggtgatctgccgacaaaagcggacctgcaggcgcaacttgacagtctaaataaacaaaaagatctttctgctcaggacaaactggtgcagcaggatctgacagatacattagccaccctcgataaaatcgatcgcataaaagaagagacagttcagctacggcaaaaagtcgctgaagcgccggaaaaaatgcgccaggcgaccgcggcgttaacagcacttagcgatgtcgataacgacgaagaaacgcgcaaaattctgagcacgctgagcttgcgccagctggaaactcgcgttgcccaggcgctggacgatttgcaaaacgcacaaaacgatctggcgtcttataacagccagctggttagcttacagacgcagcccgaacgcgtgcaaaatgcgatgtataacgctagccagcagctgcaacaaattcgcagtcgtctggatgggactgatgtcggcgagacagccttacgtcccagccagaaagtgttaatgcaggcccagcaggcgttgctgaatgcggagattgaccagcagcgtaaaagcctggaagggaacaccgtcttgcaggataccttgcaaaagcaacgtgattacgtgacggcgaacagcgctcgtctggagcaccagttacaactgttgcaagaagcggtaaacagcaagcgcctgactttaaccgaaaaaacggcgcaggaagccgtctccccggatgaagccgcgcgtattcaggctaatccgctggtgaagcaggaactggaaattaaccagcagttaagtcagcgtctgattaccgcgactgaaaacggtaatcagttgatgcagcaaaacattaaagtcaaaaactggctggagcgggcgctgcaaagcgaacgcaatattaaagagcagattgccgtcctgaagggcagcctgctgttgtctcgtatcctttaccagcaacaacaaacgctgcccagcgcggatgaactggaaaacatgaccaaccgcatcgcggatttgcgtctcgaacagtttgaagttaaccagcagcgtgatgcactcttccagagcgatgcgttcgtcaacaaactggaagaaggtcacaccaacgaagtcaacagcgaagttcacgatgcgttattgcaagtggttgatatgcgtcgcgaattgctggatcaactcaacaaacagttgggtaaccagctgatgatggccattaacctgcaaatcaaccagcagcagttaatgagtgtgagcaaaaacctgaaatccatcctgactcagcaaatcttttgggtgaacagtaaccgtccaatggactgggactggatcaaagcgttcccgcaaagcctgaaagatgaatttaagagcatgaaaatcacggtgaactggcaaaaagcctggcccgccgtttttatcgctttcctcgctggtttgccgctgctgttgattgccgggctgatccactggcgtctgggctggctgaaagcgtatcaacaaaaactggcttccgctgtgggttccctgcgtaacgacagccagctcaacacaccaaaagcgatccttatcgacctgatccgtgcgctgccggtgtgcctgattattctcgcggttggcctgattctgttgaccatgcagctcaacatcagcgaactgctatggagcttcagcaaaaaactggcgatattctggctggtgtttggcctgtgctggaaggtactggagaaaaacggcgttgccgtacgtcacttcggcatgccggaacagcagaccagccactggcgtcggcaaattgtccgcatcagtctcgcattgctgcctatccatttctggtctgtggtggcagaactttccccgctgcatctgatggatgatgtgctggggcaagcgatgattttcttcaacctgctgctgattgccttcctggtatggccgatgtgccgcgaaagctggcgtgataaagagagccacaccatgcgactggtcaccattaccgtgctgagcataatcccgattgcgctgatggtgctgactgctacaggctacttctacactacgctgcgtctggcaggacgctggattgaaaccgtttatctggtgatcatctggaacctgctgtaccagacggtactgcgtggcttaagcgtagcggcgcggcgtatcgcctggcgtcgtgcgctggcgcgtcggcagaatctggtgaaagagggcgcagaaggtgctgaaccgccggaagaacccaccattgcactggagcaagttaaccagcagacgctgcgtattaccatgttgctgatgtttgcgctgttcggtgtcatgttctgggcaatttggtccgatttgatcaccgtgttcagctatctcgacagcatcacgctctggcattacaacggcactgaagctggcgctgcggtggtgaaaaacgtcaccatgggcagtctgttgtttgcgattatcgccagtatggtggcctgggcgttgattcgcaacctgcctggtttactggaagtgctggtgctcagccgactgaatatgcgccagggcgcgagctatgccattactaccatccttaactacatcattattgctgttggtgcgatgacggtgttcggaagcctgggcgtctcttgggataaactccagtggctggccgcagcattatccgtaggtcttggttttggtttacaagaaattttcggtaacttcgtctccggtttgatcattctattcgaacgtccggtgcgtattggcgatacggtaaccattggtagcttcagcgggacggtaagtaagatccgtattcgtgcgacaacgattaccgatttcgatcgcaaagaagtgatcatcccgaacaaagcgtttgttaccgagcgtctgatcaactggagcttgactgacactactacgcgtctggtgatccgtctcggcgtggcctatggctccgatctggaaaaagtgcgtaaagtgttactgaaggcggcgactgagcacccaagggtgatgcacgaaccaatgccggaagtcttctttacggcatttggtgccagcacgttggatcatgagctgcgtctgtatgtgcgtgaactgcgtgaccgtagtcgtactgtcgatgagctgaaccgtactatcgatcagctgtgccgtgaaaacgacatcaacattgcctttaaccagcttgaagtgcatctgcacaacgagaagggcgatgaggtgacggaagtaaaacgcgactacaaaggcgatgacccgacgccagcggtagggtaaaaacgaaagggggcaacatttagttgccccgagattgctaacaaagtgcgcgttgttcatgccggatgcggcgtgaccgccttatccggcctacgaaaccgcaagaattcaatatattgcaggagcggtgtaggcctgataagcgtagcgcatcaggcagttttgcgtttgcccgcaaccttaggggacatttagcgaccccatttatttctcacttttccgcctcatcatcgcgcgttaatttcttttcataatcacgctttacaatatccagcgcgcgcagcacggtactggcagggatctgattttcctccagcagcacaatcaaatcgacagccagtttgacatcgtcaggggcattttccagactcatattctctccattgttagcgggttaaacgcgctaacctgttttcgattttttccagcgcatggcggcagcgtgccaggcgcgcttcataggcttccacttcacgatgcagcgtttgctgttccacgagatcggtcacccgcgccagacgggctctgcgttcggcaaccatctcacgtagccgccgctcaaaatcctgatgctgaatacgtttacgctgccagcgggcaattttcggtggtgcactgtcccactcgcgcaaactccaggcggaggcttcacgcgcgatggcttccagttgtgccgccagatgttccgccagccaggccacttgcggcagctgttgctgctcaactgcatgacgaagcgcagccagattatcgcccgcctcgtcgagacaagcctgtagtgttgtcgcacgagtctgaaaaagatgcctgtcgaaacgagcacttagcgtggcgaactgactcaccggggcacaacgctgacgcagcgtagcgagctgtccttccagtttttccagcagcagggcggttttcacgataagacctcaatgaaaatgataattgttatgctaaagtagccactctgtaagctgacaacactcaatatgcaacgaatcattttaatcatcattggctggctggcggtagtgctgggtacgctgggcgtggtattaccggtattaccgacgacgccgtttatcctgctggcggcctggtgctttgcccgttcttccccgcgctttcacgcctggttgctgtaccgcagttggtttggcagctatctacgtttctggcagaaacatcatgcgatgccgcgcggcgtcaaaccgcgggcgattttgcttattttgctcacgtttgccatttctctgtggttcgtccagatgccatgggtgcgcatcatgttgctggtaattctcgcctgtttgcttttctatatgtggcgaattccggtgattgatgaaaagcaagaaaagcactgaagcacaacaatcgcagttgcaattattgcgtacagccagtacattctggcgttttcgagcacaggcgcaggcggtcaaaggttaaacaactgttacttttgatacgtttaaaacgcgccgtgagtaccaccgtaacaagcaggcatacacttatgaccgcgactgcacagcagcttgagtatctcaaaaatagcatcaaaagcattcaggactacccaaaacccggcattcttttccgcgatgtcaccagcttactggaagacccgaaagcttacgctctcagcatcgacttgctggttgagcgttacaaaaatgcgggcattaccaaagttgtcggcaccgaagcgcgtggcttcttgtttggcgctccggtagctctgggtctgggcgttggctttgtaccggtccgtaaaccgggcaaactgccgcgtgaaaccatcagtgaaacttacgacctggaatacggcaccgatcagctggagatccacgttgatgccatcaaaccgggcgacaaagttctggtggtggacgacctgctggcaaccggcggcactatcgaagcgaccgttaaactgatccgtcgtctgggtggtgaagtggctgacgctgcgttcattatcaacctgttcgatctcggcggcgaacagcgtctcgaaaaacagggcattaccagctacagccttgtcccgttcccgggccattaattatcgccagtcttgtgctgcccacgctacggacagcacaagatgtgcattcagcctcgccgttctgacggggctgtgttagcattaccccttcgtgaatccaccttccagcgtttcagagcctgccaatgagttatcaggtcttagcccgaaaatggcgcccacaaacctttgctgacgtcgtcggccaggaacatgtgctgaccgcactggcgaacggcttgagcttagggcgtattcatcatgcttatcttttttccggcacccgtggcgtcggaaaaacctctatcgcccgactgctggcgaaggggctaaactgcgaaaccggcattaccgcgacgccgtgcggcgtgtgcgataactgtcgtgaaatcgagcaggggcgctttgtcgatctgattgaaatcgacgccgccagccgcaccaaagttgaagatacccgcgacctgctggataacgtccagtacgctccggcgcgtggtcgtttcaaagtttatctgatcgacgaagtgcatatgctgagccgccacagctttaacgcactgttaaaaacccttgaagagccgccggagcacgttaagtttctgctggcgacgaccgatccacagaaattgccggtgacgattttgagtcgctgtctgcaatttcatctcaaggcgctggatgtcgagcaaattcgccatcagcttgagcacatcctcaacgaagaacatatcgctcacgagccgcgggcgctgcaattgctggcacgcgccgctgaaggcagcctgcgagatgccttaagtctgaccgaccaggcgattgccagcggtgacggccaggttagtacccaggcggtcagtgcgatgctgggtacgcttgacgacgatcaggcgctgagcctggttgaagcgatggtcgaggccaacggcgagcgcgtaatggcgctgattaatgaagccgctgcccgtggtatcgagtgggaagcgttgctggtggaaatgctcggcctgttgcatcgtattgcgatggtacaacttagccctgctgcacttggcaacgacatggccgccatcgagctgcggatgcgtgaactggcgcgcaccataccgccgacggatattcagctttactatcagacgctgttgattggtcgcaaagaattaccgtatgcgccggaccgtcgcatgggcgttgagatgacgctgctgcgcgcgctggcattccatccgcgtatgccgctgcctgagccagaagtgccacgacagtcctttgcacccgtcgcgccaacggcagtaatgacgccaacccaggtgccgccgcaaccgcaaagtgcgccgcagcaggcaccgactgtaccgctcccggaaaccaccagccaggtgctggcggcgcgccagcagttgcagcgcgtgcagggagcaaccaaagcaaaaaagagtgaaccggcagccgctacccgcgcgcggccggtgaataacgctgcgctggaaagactggctagcgtcaccgatcgcgttcaggcgcgtccggtgccaagcgcgctggaaaaagcgccagccaaaaaagaagcgtatcgctggaaggcgaccactccggtgatgcagcaaaaagaagtggtcgccacgccgaaggcgctgaaaaaagcgctggaacatgaaaaaacgccggaactggcggcgaagctagcggcagaagccattgagcgcgacccgtgggcggcacaggtgagccaacttagcctaccaaaactggtcgaacaggtggcgttaaatgcctggaaagaggagagcgacaacgcagtatgtctgcatttgcgctcctctcagcggcatttgaacaaccgcggtgcacagcaaaaactggctgaagcgttgagcatgttaaaaggtagtacggttgaactgactatcgttgaagatgataatcccgcggtgcgtacgccgctggagtggcgtcaggcgatatacgaagaaaaacttgcgcaggcgcgcgagtccattattgcggataataatattcagaccctgcgtcggttcttcgatgcggagctggatgaagaaagtatccgccccatttgatcgtaagcacagcttacgttcgtcatccttaacgtgattgagagagaaacctatgtttggtaaaggcggtctgggtaacctgatgaagcaagcccagcagatgcaagaaaaaatgcagaaaatgcaggaagagatcgcgcagctggaagtcaccggcgaatctggcgcaggtctggtaaaagtgaccatcaacggtgcacacaactgccgtcgcgtagagatcgacccgagcctgctggaagacgacaaagagatgctggaagacctggtggctgcagcattcaacgacgcagcacgtcgtattgaagaaacgcagaaagaaaaaatggcctctgtatcctccggaatgcagctgccgcctggctttaagatgccgttctgatgcaaaccagcccgctgttaacacagcttatggaagcactgcgctgtctgccgggcgttggcccgaagagcgcgcagcgtatggcgttcacgctgcttcagcgcgatcgtagcggcgggatgcgtctggcgcaggcgctcacccgggcgatgagcgaaatcggccactgcgccgattgccgcactttcaccgaacaggaagtctgtaacatctgtagcaatccgcgtcgtcaggaaaacggtcaaatctgcgtggtggagagtccggcggacatctacgccattgagcagacggggcagtttagtggtcgttattttgtgttgatggggcatctgagtccgctggacggcatcggtccggatgatatcgggcttgatcgtctggaacagcgtctggcagaggaaaaaatcactgaagtgatcctcgccaccaaccccacggttgaaggtgaagctaccgctaactacattgccgagctttgcgcgcaatatgacgtggaagccagccgaatcgctcatggcgttccggttggcggcgagctggaaatggtcgacggcaccacgttgagtcactcccttgccgggcgtcataagattcgtttttaagcaaacgagagcaggatcacctgctctcgcttgaaattattctcccttgtccccatctctcccacatcctgtttttaaccttaaaatggcattattgaggtagacctacatgaaaggacaagaaactcgtggttttcagagtgaagtgaaacagcttctgcacctgatgatccattctctctattccaataaagaaatcttcctgcgtgagcttatctctaacgcctccgatgcggcggacaagctgcgtttccgtgcgctctctaacccggacctgtacgaaggtgatggcgaactacgcgttcgtgtctctttcgataaagacaagcgtacgctgaccatctccgataacggcgtggggatgacccgcgacgaagtgattgaccatctggggactatcgctaaatccggtaccaaaagtttcctcgaatccctgggttctgaccaggcgaaagacagccagctgatcggtcagtttggtgttggtttctactctgcgtttatcgtggccgacaaagtgaccgtgcgtactcgcgcggcaggcgaaaaaccagaaaatggcgtcttctgggaaagcgctggcgaaggtgaatacaccgttgccgacatcaccaaagaagatcgtggtactgaaatcaccctgcatctgcgtgaaggcgaagacgagttcctcgatgactggcgcgtgcgttccatcatcagcaaatactccgaccatatcgcgctgccggtagagatcgaaaaacgcgaagagaaagacggcgaaaccgttatctcctgggagaaaatcaacaaagcgcaggcgctgtggactcgtaacaagagcgaaatcaccgatgaagagtacaaagagttctacaaacacatcgcccacgactttaatgatccgctgacctggagccacaaccgtgttgaaggtaagcaggagtacaccagcctgctgtacatcccgtcccaggctccgtgggatatgtggaaccgcgatcataaacacggcctgaaactgtatgttcagcgtgtgttcatcatggacgacgcagaacagttcatgccgaactatctgcgcttcgtgcgtggtctgattgactccagcgatctgccgctgaacgtttcccgtgaaatcctccaggacagcacggtaacgcgtaacctgcgcaatgcgctgaccaagcgtgtgctgcaaatgctggaaaaactggcgaaagacgacgcggaaaaataccagaccttctggcaacagtttggcctggtactgaaagaaggtccggcggaagatttcgctaaccaggaagcgatcgccaaactgctgcgttttgcttctacccataccgattcttctgcgcagaccgtatctctggaagactacgtttcccgcatgaaagaagggcaggagaaaatctactacatcaccgcagacagctatgcggcagcgaagagcagcccgcacctggaactgctgcgtaagaaaggcatcgaagttctgctgctttccgaccgcatcgatgagtggatgatgaactatctgactgagttcgacggtaaaccgttccagagcgtgtctaaagttgacgagagccttgaaaaactggctgacgaagttgatgagagcgcgaaagaagcggagaaagcactgactccgttcatcgaccgtgtgaaagccctgctcggcgagcgcgtgaaagatgtccgtctgactcaccgtctgaccgatacgccagcgatcgttagcaccgacgcggacgaaatgagcactcagatggcgaaactgttcgctgcggcgggccagaaagtgccagaagtgaaatacatcttcgaactgaacccggatcacgtactggtgaaacgtgcggcagatactgaagatgaagcgaagttcagcgagtgggtagaactgctgctggatcaggcgctgctggcagaacgcggcacgctggaagatccgaacctgtttattcgtcgtatgaaccagctgctggtttcctgatgtaatgccggatgaccttcgtgtcatccggcatttttcttttcatcatctgcactttccgcaaattatctcgccattaaccgtttcagccccaggtgcctttcttgaggcaatcgcctgttggtggtatcgtttatcgctttttcaaaaaattcgacacattttaaggggattttcgcaatgcgtatcattctgcttggcgctccgggcgcggggaaagggactcaggctcagttcatcatggagaaatatggtattccgcaaatctccactggcgatatgctgcgtgctgcggtcaaatctggctccgagctgggtaaacaagcaaaagacattatggatgctggcaaactggtcaccgacgaactggtgatcgcgctggttaaagagcgcattgctcaggaagactgccgtaatggtttcctgttggacggcttcccgcgtaccattccgcaggcagacgcgatgaaagaagcgggcatcaatgttgattacgttctggaattcgacgtaccggacgaactgatcgttgaccgtatcgtcggtcgccgcgttcatgcgccgtctggtcgtgtttatcacgttaaattcaatccgccgaaagtagaaggcaaagacgacgttaccggtgaagaactgactacccgtaaagatgatcaggaagagaccgtacgtaaacgtctggttgaataccatcagatgacagcaccgctgatcggctactactccaaagaagcagaagcgggtaataccaaatacgcgaaagttgacggcaccaagccggttgctgaagttcgcgctgatctggaaaaaatcctcggctaattcgaaagcgcgcacggacagtcccctcgccccctcggggagagggttagggtgaggggaacaggcccgcacaagcaaacttatcagcaatctcaggccggatattcattcggccttttacaaaaacctcaatctgcgctattcctttttctgatttgacctctcacagcaattagttcttcttcctcacttttccgctacaattatcaacaagttgaatcgataagaggcggtaatgcgtcagactaaaaccggtatcctgctggcaaacctgggtacgcccgatgcccccacacctgaagcggtaaaacgctatctgaaacaatttttaagcgacagacgcgtggttgataccagtcggttgttatggtggccattgctgcgcggcgtgattttgccgctgcgcagcccgcgtgtggcgaagctgtatgcctctgtctggatggaaggtggcagcccgctgatggtttacagccgccagcaacagcaggcgctggcacaacgtttaccggagatgcccgtagcgctgggaatgagctacggcagcccaagtctggaaagcgccgtagatgaactcctggcagagcatgtagatcatattgtggtgctgccgctttatccgcaattctcctgttctacggtcggtgcggtatgggatgaactggcacgcattctggcgcgcaaacgtagcattccggggataagctttatacgtgattacgccgataaccacgattacattaatgcactggcgaacagcgtacgcgcttcttttgccaaacatggcgaaccggatctgctactgctctcttatcatggcattccccagcgttatgcagatgaaggcgatgattacccgcaacgttgccgcacaacgactcgtgaactggcttccgcattggggatggcaccggaaaaagtgatgatgacctttcagagccgctttggtcgggaaccctggctgatgccttataccgacgaaacgctgaaaatgctcggagaaaaaggcgtaggtcatattcaggtgatgtgcccgggctttgctgcggattgtctggagacgctggaagagattgccgagcaaaaccgtgaggtcttcctcggtgccggcgggaaaaaatatgaatatattccggcgcttaatgccacgccggaacatatcgaaatgatggctaatcttgttgccgcgtatcgttaaagctgagcggtaaagaactgagcgccgtcgcgaagagcctcgtcggcggttttcatcatccgactataatgcaaaaaggcgtgcagcgtgcctgggtagagtttgaactcacagggctgctgatgcgccgctaacgtctggtaaagcagacggctgtcatccagcagcggatcgaactccgccccggcaataaaacagggcggaacttcgcgagtgagatcattattaaacagacagtaatacgggctctcgcggtccgcgtcgttgcttaaatatgcctcttcgtacatctgcaaatcctgttgcgttaagccatcccagacaccgcccaacagacgacgagtcacggaatcccgtaatccgtaaagcccataccacagcaaaacgcccgcaactttaccgcaatcgatctgtttatcacgcaaccacaacgcactggcgagcgccagcatggcacctgcggaatcaccggcaaagccaatgcgggacatattgatttgataatcctccgcctgctggtggaaataacaacaagcagccacaatttcctctatcgcttgcggaaaacgcgcttcaggactaagggtgtaatcaataccaatcaccgtacattggctgtagcttgccagcaggcgcatgatgcgatcgtgggtatcgagattgccgagaataaaaccgcctccatgcaaataaaatagcgtcgctgggctatctggctgcggacaaaagagacgtgtttccacctgcccatattttgttggaaccatgtaagctctggttgccatttctggagcgcccgcattccagaatcggcgctcaagcgtgtaatactgtcgttgctcagcaatcgttcccgttgcgggccagggcggtaaatccggctgaagagtattcacaacggtcttcatttcagcagaaataaggtccagaacaggtagtttgttttccggcttcatacaaaaactcctttcaaattacgtcattgtaaggaaccactgccatgaaaatgcgatcccgcctgctgatattgaaactggctgcgtctcgcgcgctcccgtcagattgtgttaacattcgccgctcagttaaccacccgtaaaaacaaccatgaaatttcccggtaaacgtaaatccaaacattacttccccgtaaacgcacgcgatccgctgcttcagcaattccagccagaaaacgaaaccagcgctgcctgggtagtgggtatcgatcaaacgctggtcgatattgaagcgaaagtggatgatgaatttattgagcgttatggattaagcgccgggcatagtctggtgattgaggatgatgtagccgaagcgctttatcaggaactaaaacagaaaaacctgattacccatcagtttgcgggtggcaccattggtaacaccatgcacaactacagcgtgctcgcggacgaccgtagcgtgctgctgggcgtcatgtgcagcaatattgaaattggcagttatgcctatcgttacctgtgtaacacttccagccgtaccgatcttaactatctacaaggcgtggatggcccgattggtcgttgctttacgctgattggcgagtccggggaacgtacctttgctatcagtccaggccacatgaaccagctgcgggctgaaagcattccggaagatgtgattgccggagccagcgcactggttctcaccagttatctggtgcgttgcaagccgggtgaacccatgccggaagcaaccatgaaagccattgagtacgcgaagaaatataacgtaccggtggtgctgacgctgggcaccaagtttgtcattgccgagaatccgcagtggtggcagcaattcctcaaagatcacgtctctatccttgcgatgaacgaagatgaagccgaagcgttgaccggagaaagcgatccgttgttggcatctgacaaggcgctggactgggtagatctggtgctgtgcaccgccgggccaatcggcttgtatatggcgggctttaccgaagacgaagcgaaacgtaaaacccagcatccgctgctgccgggcgctatagcggaattcaaccagtatgagtttagccgcgccatgcgccacaaggattgccagaatccgctgcgtgtatatagccacattgcgccgtacatgggcgggccggaaaaaatcatgaacactaatggagcgggggatggcgcattggcagcgttgctgcatgacattaccgccaacagctaccatcgtagcaacgtaccaaactccagcaaacataaattcacctggttaacttatagtagcttagcgcaggtgtgtaaatatgctaaccgtgtgagctatcaggtactgaaccagcatagtcctcgtttaacgcgcggcttgccggagcgtgaagacagcctggaagagtcttactgggatcgttaagttatcgtcggttcgtaggccagataaggcgttcacgccgcatctggcatttggctctcgatgcctgatgcgacgctggcgcgtcttatcatgcctacatatttttcatattttacatccggcaaccaccgtttaccccgtcaccacctcacccgccggtggcgtttccagcagttccagcatggtacgggcgatttcacgctcgcccatcactacctgattcgcaccacgttcggtgatatacgccacttcatcgtcataatgggcgcgggcaataatctcaatatccggatttttcgcgcgggcagatgccacaatctcacccgcttcataaccgttgggaatcgtcaggatcagccattttgcacattccagatgcgccagttgcataatttcttcgttcgccgcattgcccaatactgcgcggaccccgcgctctcgcagctcatcaacacgggttcgactcgtctcaatcaccaccagcggaatatcagaggcgagcaatttctcccccagcaggctgcctacacgaccgtaacccaccagtagcgcatggttgcaaatatccactgggatctgcttctcttcttcgattgcctcttccagcgtctgctcttccagcgtttcggtcttcgccagatatttctccagtagtgcgaacagtaccgggttgagcataatgctcaggatcgcccctgccagtaccaggttttgtccggcctgcggcagtaaattcaatgccattcccagtcccgccaggataaacgcgaactcaccaatctgcgccaggctggcggcgatggttaatgccgtacgttgggagtgaccaaacagtcgcaccaggaaaaatgcggctaagctcttaccaaacagaataatcgccagcgtcgccagcactgccagcggttgctgaatcagaattaacggatcaaacaacatcccgacggagacaaaaaacagcaccgcaaacgcgtcgcgcaatggcagcgtatcgtgggcggcacggtgactcagttcagactcgttcagtaccatcccggcaaagaacgcaccgagtgcaaaggagacatcaaacagctctaccgcaccaaaggcaacccctaacgccagcgccagcacgctcagggtaaacagctcgcgagaaccggttgccgcgctgcgtgccataatccacggcaccagacggcgacctaccagcatcataatggcgataaatgcgatcactttgccgatggtgatccccatatcgactgcaagagtggcaaagcccacatcgccctgttccatcattcctgccactgcgggcagcaacaccagcgtcagaaccattaccaggtcttccacaatcaaccaaccgatggcgatttgcccacgctgactgtcaattaattgccgttcttcaagtgcgcgcagtaacaccacggtactggcggtggaaagacataaaccgaacacgataccggtcattaagctccagcccagcacggcagagagcgccatacccagcagcgtcgccacggctatctgggcgatcgcaccgggaatggcgatggcctttaccgccatcaaatccttcaggctaaagtgcaaaccgacgccaaacatcaacagaatgacgcccagttcagccagttccggggcaagcttggtatcggcaacaaagcccggagtgaatggtcctgccagcacacccgctaacagatatcccaccagaggagaaatacgtagtttattggccagcatgccgaggataaaggcgagcacaaggccgccaacaatggtggtgataagcggggtggcgtgatgcattccgtctccttttcctggtggttattgtccatttttggccgggaaaaccaaaattacaggtaatagtttatgacaatttcattgatgatgttcatgaataattattgaattttgcagaaaaatggaattagctgcaaaaaaagcacggatcggaaaacagaaggcggtttaacagaggaaaggcttatggcgactgtaaaacgatgcagccaaagtttgcctttggctgcaatgaaatcagtctttatgccggttatcaggcaggaatatggtcaacatccccaatagtggcaggaaagcacagattttatagactaactcgatgctggtgtgatcggcgataagccccagaactgccgctcccagacctcccatgccaaaagcaaaaccgaaaaagagtccagaaaccataccgatacgtcctggaagcagctcctgagcgtagaccagaatggcagagaatgcgctagcgaggataaatccaataatcaccgttaaaacccccgtccagtgcaggctggcgtagggtaaaatcagcgtaaacggcgcaacgccgaggatagagccccaaatcacatatttccgcccaattttatcccctacaggcccgccgatcaccgtacctgccgcaacggcaaacaggaaggcaaacagatgaagctgagcattctggatagataatccgaatttttgcatcagataaaaggtgtaatagctgctgatgctcgccatatagaaatatttgctgaaaatgaggattaacagaatgctgaccgccagtacaactttattgcgcggcagtggattgataatcgtcgctttgggttttcctttattcattcggtgctgtgcgctgtaccaacggctgatttgcgccaacaccacgatcgccagcagtgccgcaagcacaaaccaggcaacgttgcctttgccataaggcgcgataatcaccgccgccagcaagggtcccagggaactgccaaagttgccgccgacctgaaagatagattgcgccaggccatgccgcccgccggaagccatacgggccacgcgagaagattccggatgaaagacgctactaccggtaccgaccagcgccgccgccagcagaactgcgccaaaactgcccgccagcgcaagcagcaccagaccgcttaaggtaaagcacatgccaattggcaagctccatggcatcggatatttatcggtccagtagccgaccactggttgcagtaggctagaggcgagctggaaggtgagggttatcatgccaatctgcataaatgtcagagaaaattcactctgaagcagcggataaatcgccagaatcaggctttggatcatgtcgttcagcagatgactgaggctgatagcacctaaaataccaaagcttgttcgggccttggtcgtactcgcagccgcgcccgccacaggctggggttgttcactcattgccataggaaagtcactttttcagggttgcgatgtaaagaatgatcttatttgtgattattaccagactaacatacctgtatgcgtcgtctgaaggaagtctcaacgccgaatacagaatttctaatctggatgcagatttatcttcaccggacgcagacttgtctatgatgtcgcgtcatactatttttcaacacgttgaaatcaggtcagggagagaagtatgaaattattgcagcggggcgtggcgttagcgctgttaaccacatttacactggcgagtgaaactgctctggcgtatgagcaggataaaacctacaaaattacagttctgcataccaatgatcatcatgggcatttttggcgcaatgaatatggcgaatatggtctggcggcgcaaaaaacgctggtggatggtatccgcaaagaggttgcggctgaaggcggtagcgtgctgctactttccggtggcgacattaacactggcgtgcccgagtctgacttacaggatgccgaacctgattttcgcggtatgaatctggtgggctatgacgcgatggcgatcggtaatcatgaatttgataatccgctcaccgtattacgccagcaggaaaagtgggccaagttcccgttgctttccgcgaatatctaccagaaaagtactggcgagcgcctgtttaaaccgtgggcgctgtttaagcgtcaggatctgaaaattgccgttattgggctgacaaccgatgacacagcaaaaattggtaacccggaatacttcactgatatcgaatttcgtaagcccgccgatgaagcgaagctggtgattcaggagctgcaacagacagaaaagccagacattattatcgcggcgacccatatggggcattacgataatggtgagcacggctctaacgcaccgggcgatgtggagatggcacgcgcgctgcctgccggaagcctggcgatgatcgtcggtggtcacagccaagatccggtctgcatggcggcagaaaacaaaaaacaggtcgattacgtgccgggtacgccatgcaaaccagatcaacaaaacggcatctggattgtgcaggcgcatgagtggggcaaatacgtgggacgggctgattttgagtttcgtaatggcgaaatgaaaatggttaactaccagctgattccggtgaacctgaagaagaaagtgacctgggaagacgggaaaagcgagcgcgtgctttacactcctgaaatcgctgaaaaccagcaaatgatcagcctgttaagtccgttccagaacaaaggcaaagcgcagctggaagtgaaaataggcgaaaccaatggtcgtctggaaggcgatcgtgacaaagtgcgttttgtacagaccaatatggggcggttgattctggcagcccaaatggatcgcactggtgccgactttgcggtgatgagcggaggcggaattcgtgattctatcgaagcaggcgatatcagctataaaaacgtgctgaaagtgcagccattcggcaatgtggtggtgtatgccgacatgaccggtaaagaggtgattgattacctgaccgccgtcgcgcagatgaagccagatagtggtgcctacccgcaatttgccaacgttagctttgtggcgaaagacggcaaactgaacgaccttaaaatcaaaggcgaaccggtcgatccggcgaaaacttaccgtatggcgacattaaacttcaatgccaccggcggtgatggatatccgcgccttgataacaaaccgggctatgtgaataccggctttattgatgccgaagtgctgaaagcgtatatccagaaaagcagcccgctggatgtgagtgtttatgaaccgaaaggtgaggtgagctggcagtaatccgaaagtgccggatgtttgcatccggcacaatgcttaatcgcggcgggcgatatcagcaaatttggcatcgaggatctttgccagatcgcctgccgccagttcgatatccagtccgcgcttgccgccggaaacataaatagtggcaaattcttgtgcgggggcgtcgataatcgttggcagacgttttttctgccccagtgggctaatccccccaaccaggtatcccgtgctacgctgcgcgaccatcggatcggccatctcaactttcttggcacccagcgcttttgctacttttttaagatccagttgacctgcgaccggcgtaacggccacggcaaggtgtttcatatcaccgttcactgccaccagcagcgttttgtagacctgatccggattcaaacctaattttttgacgacttcatcgccaaaattggtttcagccggatcgtgctcgtaggtatggatttgaaagctaatcttgtttttttcgagtaatttaactgcgggtgtcatggtaattttcctgccttaaacaaaaaaacgaagcaagcatacgcctgatggcggtccaaaaaaaagagtcatcttgcctaagagtattggcaggatggtgagattgagcgacaatcgagttacaccgtcgcttaaagtgacggcataataataaaaaaatgaaattcctctttgacgggccaatagcgatattggccatttttttagcgcaacatttgcggcaaattcccttctccatacaggtgtagtgcaccgaccgcgaccacatatcgccccggcggcatggcgcgtaatttatcccgccaggcgagatttcgctgatgcatcagcacatcgtacaggctctgactgaacgtattgggcagcgttatatcattattttgcggcggtgcattcagccaccagctcatcatttgttgcagcaaccgtgcgttggtatgccagtgggtcagcgtatcgtccagcagcgccagtcctttgtcagggagctggagcaacatggcaatctggttttcagccccttccagttcaatcacgggtttatgttgttgcttcgccgcctgcaatagctggtaatcgataccgtattctgcccgcagccccagtttttgtgcctgcgtcgcctgaagaaccatcgcgatttgccacagcggttgggtagaaaagagactgggagaaatgcccatctcctggctaatgtgctgcaggttttggagttgctcctcgctaatgcgctcttccagcgcctcgcaggcaggcaaattagcaaaaggcgtatcgctggtggaaacatccgcctcgacgatcagcgcatcggcgtttttgagctttttgagcaaacgggtgggcaggggagccatatcgtggctacccatatgaatactgccaatcagatgaaaatggcgattgccggggagggtgatatcgatggcaggccaggtgtaatgattaccgcgcagcgcggcccaaagcgtttttacccggtacaacagatccatacgacctccctttgtgaaatatcatgctagcgcgcggtgagggatggcgcaaatggagttggagacttgtttaatgtgtttgtatgattcagtatgttcttgcatcgctattcacaaggaagcaacagttaaaaaccatgaaacaggcaacaagaaaaccgacgacacccggagatattcttctctatgaatatctggaaccgctcgatttgaaaatcaatgagttagcagagttgctgcatgttcatcgtaatagcgtcagtgcactgatcaataacaatcgtaaactcactactgagatggcatttcgtctggcgaaagtttttgataccacagtcgatttttggctaaacctccaggcggcggttgatctttgggaagttgaaaacaacatgcgcacccaggaagaattgggacggattgaaacagtggctgaatatttggcacgccgtgaagagcgtgcaaaaaaggtcgcgtaaggccaaaacatcgcttcatctcgtaggccggataaggcgttcacgccgcatccggcatccgagcaccattgcctgatgcgacgcttacccgtcttatcaggcctacaaacttgtgcctgaaccgtaggccggataaggcgtttacgccgcatccggcatccgagcaccattgcctgatgcgacgcttacgcgtcttatcaggcctacaaacctgtgcctgaaccgtaggccggataaggcgtttacgccgcatccggcagtcatgcgtcgatgccaaatgcgccaccctaaagcagcgcatccgcaatgatgtacttattccttcggtttaaaccgcagcaaccggttggcgttactcactacggtaatgctgctgagcgccattgccgctccggcaactaccgggttaagcagtgttccagtgaacggccacaaaataccggcggcgaccggaataccgatactgttgtagataaacgcaccgagcaggttctgcttcatgttgtgcagcgttgcgcgggaaatagcgagcgcatccgcaacgcccatcaggctatggcgcatcagggtaatcgccgcggtttcaatggcaacatcactgccgccacccatcgcaatgccgacatccgcctgagccagcgctggcgcgtcgttaatgccgtcgcccaccattgccacctaacgtccttcactttgcagatgtttgatcgcttcggctttaccgtccggcagcaccccggcgatcacctcatcaatccctgcttctttggcgatcgcattggcggtggttgggttatccccggtcaacatcaccagacgatatcccgctttatgcaggcgttgcagcgccgccacgctatcactacgcaacggatcgcgtactgccagcagggctaccgctttcccgtcaaccgccagcagcacaggcgttgccccttggcttgcctgagcagtaatctccgcttcgatagctttggtaccaacctgttgctcatttaacagcgcctgattgcccagcaataacgcatgaccttcagcttcaccgctcacgcccagcccgcgcaatgtgcggaaaccgttgacctgcggtagctgcatatcacctgctttatcgaggatcgctcgtgccagcggatggctggaaccttgctccagtgccgccgccagacgcaatgcctgcgcttcatcaacatcagcaaatgttttcactgcgacaacctgcggcttcccttcagtcagcgtcccggttttatcgaacactacagtgtcgagtgtactggcgcgttgcagcgcgtcagcgtcccgcaccagcacgccaaactcagccgcccgcccgacgccggaaataatgctcatcggcgtcgccagccccagcgcacacggacaggcaataatcagtaccgtggtggcaatcaccagggtatagacaatctgcggtgccggaccaaagaaataccagattgccgcactgacaagcgcaataaccaccactaccggcacaaatacggcactgattttatccgccagctgaccgatttctggcttgctgctctgggcctggcgcaccatgcgaatgattcgactcagcgtagtatggctgccaaccgcactggcacgaaacagcacactgccgtcctgtaccactgtcccggcatggacgctatcgccttcgcctttttgctgcgggattggttcgcccgtcagcatcgcttcatccagccatgcttcgccctgggtaatctcgccatctaccggcacgcgatcgccggtcgtcaggcgcagcaacatacctggctgcacttctgccagaggcacgcttttttcaccttcgtcagtaaccaggcgtgccgtcggcggggttaaatcgagtaacttttccagcgccttagaagaacgctggcgtgcgcgcgcttccagcatatggccgagattgatcagaccgataatcatcgcgctggcttcgtaataaagatgtcgcgcttccatcgggaaccactgcggccacaggttgacgctcatgctatagagccacgccacgccagtacccagcgccaccagcgtatccatcgtcgccgcaccgttcagcaggcttttccatgcactgcggtaaaaatggccgccggcgaaaaccatcactgccagggttatcaggccgataaccaaccacaggctgcggttgtcagcggtgaccatcatgttatcgccgatcatcccccagaccatcaccgggatacccaccgccagtgcgacaattgcctgccagcggaagcgcttcatcgtagcgacggcggtttcttgctggcgctcgcggcgtttagcgtcatcttcaatcgcttccgcgccgtagcccgctttttccaccgcctgcactaaatcttgtggggaggcactgcccatcaccagcgcagtacgctccgccaggtttacccgtgcctgagtgacgcccggtacgctttgcagcgcattttgtacgcgggtgacacagctggcgcagctcatgccgctcagcagcaactgctggctgtcatcgtcatcggcggtcgctgccggaagcgcctcagaaaccgctgtcagtgcttcgctcgggatactactctccgccagcggtttagcctttgggtggcttacagatgcgtcataacccgcttgtttgatggtttcgatcagctgttctgcactggcagtcccggtaacgtgcgcttcagtgatagacacatccgcctgctcaacatccggacgctgttcaagactttctttcacgcgtttaacgcagtgaccgcaggacaggccgtccagggtcaggtcgatagtttgactcataaaacactcctttaagacagttttgactggctgtgataaaggttaaaccttccagcaaggggaaggtcaagaaattaataaaccaggcgggtaaaagtccgtaaagattaaaaaatcggctcgatttgcatcaggattagacatttatctctttgttttcctgtagttaagttgcgggtgctaagttaaatcaggatgcctgaaaatcggcaccggggtgaggaattacctcccgcatctataaaaaggagttaacaaaagatgttagatgcaaacaaattacagcaggcagtggatcaggcttacacccaatttcacagtcttaacggcggacaaaatgccgattacattccctttctggcgaatgtaccaggtcaactggcggcagtggctatcgtgacctgcgatggcaacgtctatagtgcgggtgacagtgattaccgctttgcactggaatccatcagcaaagtctgtacgttagcccttgcgttagaagatgtcggcccgcaggcggtacaggacaaaattggcgctgacccgaccggattgccctttaacagtgttatcgccttagagttgcatggcggcaaaccgcttagcccactggtaaatgctggcgctattgccaccaccagcctgattaacgctgaaaatgttgaacaacgctggcagcgaattttacatatccaacagcaactggctggcgagcaggtagcgctctctgacgaagtcaaccagagcgaacaaacaaccaacttccataaccgggccatagcctggctgctgtactccgccggatatctctattgtgatgcaatggaagcctgtgacgtgtatacccgtcagtgctccacgctcctcaatactattgaactggcaacgcttggcgcgacgctggcggcaggtggtgtgaatccgttgacgcataaacgcgttcttcaggccgacaacgtgccgtacattctggccgaaatgatgatggaagggctgtatggtcgctccggtgactgggcgtatcgtgttggtttaccgggcaaaagcggtgtaggtggcggtattctggcggtcgtccctggagtgatgggaattgccgcgttcagtccaccgctggacgaagatggcaacagtgttcgcggtcaaaaaatggtggcaagcgtcgctaagcaactcggctataacgtgtttaagggctgatcatgatgaacacggaaggtaataacggtaacaaacctctcggtctatggaacgtcgtttccatcggcattggggcaatggtgggggcggggatcttcgcgctgctggggcaggctgcattgctaatggaagccagcacctgggtcgcctttgcttttggcggtattgtggcgatgttttccggttatgcctatgcgcgtctgggggcgagctatcccagcaatggcggcattatcgacttctttcgtcgcggattaggcaacggcgtctttagcctggcgctcagcttactgtacctgttgacgctggcggtgagcatcgccatggtcgcccgtgcttttggcgcttatgccgtgcagtttttgcatgaaggcagccaggaggagcaccttattttgctctacgcgttggggatcattgcggtgatgacgcttttcaactccttaagcaaccatgcggtagggcggctggaagtgatcctcgtcggcattaaaatgatgatcctgttattgctgattattgccggtgtctggagcctgcaaccggcgcatatttccgtctctgcgccccccagctccggtgcgttcttctcctgtattgggataactttccttgcctatgcgggctttggcatgatggcgaacgcggcggataaagtgaaagatccgcaggtcattatgccacgggcgtttctggtggcgattggcgttaccacgttgctttatatcagcctggcactggttttgcttagcgatgtaagcgcattagagttagaaaaatatgccgataccgccgtagcgcaggctgcttctccgctgctcgggcatgtgggttatgtgatcgtcgtcatcggcgctttactggcgacggctagtgccattaacgcgaacctgttcgccgtgtttaacatcatggacaacatgggcagcgaacgcgaactgccgaagctaatgaataaatccctgtggcggcagagtacctggggcaacattattgtcgtggtgttgattatgctgatgacggcggcactgaatttaggcagtctcgccagcgttgccagcgccacctttttgatttgctacctggcggtgtttgtggtggcgatccgcctgcgtcatgatattcacgccagcttgccgattcttatcgttggtacgttggtgatgttgttggtgatcgttggctttatctacagtctgtggtcccagggtagccgtgcgttgatatggattattggcagtctcttactcagccttattgtggcaatggtcatgaagcgcaataaaaccgtataacatctctctgtgcgcagtacttcctgtattattgtggtggcggtcgatattcgcactggcaaaaaaacgtgcttgaatatctgttgaaaccctttaacaaagcacaggaggcgttgcgcgaacgatgaacatcagcgatgtagcaaaaattaccggcctgaccagcaaagccattcgcttctatgaagagaaggggctggtgacgccgccgatgcgcagcgaaaacggttatcgcacctacacgcagcagcatctcaacgaactgaccttactgcgccaggcacggcaggtgggctttaacctggaagagagcggcgagctggtgaatctgtttaacgacccgcagcggcacagcgccgacgtcaaacggcgcacgctggagaaggtggcggagatcgaacgacacattgaggagctgcaatccatgcgcgaccagctgctggcactggcgaatgcctgccctggcgatgacagcgccgactgcccgattatcgaaaatctctccggctgctgtcatcatcgggcagggtgattaagagctgacggctcggatatgtagggttatcccttctatcgcaatgacttcaacatgcgtacctgcaccgagatcctcgctggcgctgacaggccaactactgtcaccgacgcgcatatgaccgcgcccgttgaccagcggagattccagcacaaaacgtcggccaatcagctgctgcccgcgctggtttaaatgactatcgctgtgcttttgttcgcgcacccgccggctcaaccatttccaccacagccaggcggcgagcagcgtcaggatggcaaacattaccccttgccactcccaacccagcggcaccagccagaccaccaggccggtaatcaccgctgccacgccgctccacaacaaataaccatttccgcccagcatctcggctgccagcagcaaaccgccgagactgagccagaaaatatgtggatgaacgaccattaactccatcatggctgagtccgtttgttggcgctgtctttcaccagctcggcaatcccggcaatgctccccatcaggctgctggcctctaatggcatcatcactactttgctgttactggaggaaccgatctgctgtaacgcttcggtgtatttctgcgctacgaagtagttcaccgcctgaatatcaccggaggcgatagcttcagacaccattttggtggcgcgggcttctgcttcggcggaacgttcacgcgcttcagcctgtaaaaacgcgctctgacgttcgccttccgctttcaggatttggctctgtttttcaccttcggctttgaggatttccgcctgacggatcccttccgcttcaagaatgtaagcgcgtttggtacgttccgctttcatctgcgcgttcatactagagataagctctgccggtgggcgcacgtcgcgaatttcaatacgggtgactttaatcccccacgggttggtggcttcatcgacaatacgcagcaggcgactgttgatgctgtcgcgctgagagagcatttcgtcaagttccatactacccagcacggtacggatgttagtcatggtcaggttgatgatcgccagctccagattgctgacttcataagccgcgcgcggcgcgtcaatcacctgaataaagcacacggcgtcgatggtaacgttggcgttatctttgctgataacttcctgggaagggatatcgagcacttgctccatcatattgatcttgcgaccaatgcgatccataaacggcaccaccagactgagccccggctgtaacgttttggtatagcgaccaaagcgttctactgtccactgatagccctgcggtacgattttgacacccgcgccgacaatgaccagcgcgacaaaaatgagaatcgggataaagataagcatcggaaaaacctcctgttgtaccgtccataatcagcaaaattgctgcttgattaaacaaattatacctgattactgaaagagagttcccccttattcctgcgaaggataaactgtttttagtaaaaatcagaaaaagggaacagcgatgcaggaaaatagtcctttgcttcagctacaaaacgtaggatatctggcgggtgatgcgaagattcttaataacatcaattttagcctgcgtgctggcgaatttaagttaattaccggtccttctggttgtggcaaaagtacgctgctaaaaatagttgctagtttgatcagcccaaccagcggaacgttactgtttgaaggtgaggatgtcagcacactaaagccagaaatctaccgccaacaagtctcttactgcgcccagacaccgacgctgtttggcgatacggtatacgataatctgatctttccctggcagatccgtaaccggcagcctgacccagccatttttctcgattttctcgaacgcttcgccttgccggacagcattttgacgaagaatatcgccgagctatctggtggtgaaaaacaacgcatcagtttgattcgtaacctgcaatttatgccgaaggttttattgctggatgaaataaccagtgcgctggatgaaagtaataaacataacgtcaatgagatgatccatcgttatgtgcgcgagcaaaatattgccgtgctgtgggtgacacacgataaagacgaaattaatcatgcggataaagtgattacactgcaaccgcatgccggagaaatgcaggaagcacgctatgaactcgcataactaaagaaatgcaggaagcacgctatgaacagccataatattactaacgaaagtttagcactggcattaatgctggtggtggtggcaatcttaattagccataaagaaaaactggcgctggagaaaaatattctctggagcgtcgggcgagcgataattcagctgattattgtcggctatgtgctgaagtatattttcagcgtggatgatgccagcctgacattattgatggtgttatttatctgctttaatgcggcgtggaacgcgcaaaaacgcagtaaatatattgctaaagcttttatcagtagctttattgccattacggtcggggcgggaattaccctggcggtgctgattctcagtgggagcattgaatttatcccgatgcaggtgatccctatcgccgggatgattgccggtaacgccatggtagcggtggggttgtgttacaacaatttagggcaacgggtcattagcgaacagcaacagattcaggagaaactgagtcttggtgcgacgccgaagcaggctagtgcgatattgattcgcgacagtattcgcgcggctttaattccgacggtcgatagtgcaaaaacggttggcttagtgagtttaccaggaatgatgtccgggctgatatttgccgggattgatccggtgaaggcgattaaatatcagattatggtgacctttatgctgctcagtaccgccagcttgagcaccattattgcctgctatttaacctatcgtaagttttataatagccgccaccagttggtggtgacgcaattgaagaagaaatgatgcgatgccggatgcgcagcatcgcatccggcgttgtggttcatgtgccgatcaacggaatatcaatacaacaatgcatacagctggcggcgatacttgctcgccagtgcatcacccgtacccagcgcagcgaggatctcctggaacgttttacgcgtctgaccgtctgcggcggtgagatctttacgcagatgcccgaacagcaactccagcgcctcttcattgcgcccaacctgatgcagttgcagcgccagttgcgtcgccagtgcggcatcttctggattctccgccacctgctgttgcaactgttgaatttccggcgtatcagccgcctgcttcagcagttcgatttgcgccaccagcccctggtagcgggtgtcctgatcctgcaacggaatggttttcagcaccgcttccgcatcttcagaacggttcagcgcaatcagcgtttctgccagcagcaggccgatctccccgttctgattgctcaactgccaggcgtctttcagcaatggcagggcatcggtgtaattgctttcctgcatcagttgcatcgcctgctgcgctttcagctcttcttcgcgcggcagcactttatccagcagggcgcggatcgcctcttccggttgcggcccctggaagccatctaccggttgcccgttctggaacagatacacggtcggaatcgcacgcagaccaaactgcgcggcaatcatctgctccgcgtcgcagtccagcttcgccagaataaattgcccgttgtactgcgccgcgaggctttccagaattggggttaactgcaaacagtgctggctacgttcagaccaaaaatagaacagcaccggagtggtcatgctctgttcaagaacctgttgcaggttagattcgttaatgttgacaatattttctacggacatggagtcgctctctgttgtcgatattttctttgacatgggggcttaagcgcgcgcttcaactcacccctgcaatattttgtccatcacgcgccccggcagcaggcgcttaagcaccattaccgcccaggtcaccagcgtcaccggatagcgcatcttcggcttctcgctaataaaagcatggcgtactttgtccaccaccgcttccggtcccaacgtaaagcgggcggcgatgccgggattttcgactggtttatcactttgcgtctggttgacgttgtcggtgaagcgagtacgaatgggaccgggttcgatcaggctgactttaattccgctgtggcgcagctccatgcgcagtgcatcactccacgcctccagcgcatatttactggccgcgtaagcgccacgacccggcgtggagattaatcccatcacgctacttgtcatcacaatacgcccttcaccgtgcggtaacatcgcgggtaacaggcgcatggtgagctggtgtgcgccgaaaaagttggcggaaaactgctgttccatctgcgcacggctgatggtggaaagggggccatacatgccgaatccggcattgttaaagatcccatacagacaattatcggtcagggcgatcacctcgtcggctgcgcgatcaacactttctggactatccagatcgatcaacacgccggtaaatcccatgctgttcatgcgctcaacatcatccggtttccggcaacctgccagcacatgaaaaccctggcgttttaattcgagcgcgctttccaggccaattccactggaacatccggtaattaagacgcttttttgcataactttacctgtcaggatctccgttgctttatgagtcatgatttactaaaggctgcaacttatttaactgtcatgatttactaaaggctgcaactgcttcgccatccagtcggcaataaacggctgggcgtcgcggttgggatgaataccgtcatcctgcatccattgtggcttgaggtagacctcttccataaaaaagggcagcagcggaacatcaaactctttggcgagtttggggtaaatggcgctaaaggcttcattataacggcgaccatagtttgcaggcagacgtatttgcattaacaatggttcagcgttggcggctttgacatcctgcaaaatctggcgcagcgtttgctcggtttgctgtggctgaaaaccacgcaaaccgtcattgccgcccagttcaaccagcacccaacgcggctgatgctgtttcagcagagccggaaggcgcgccagtccttgttggctggtgtcgccgctgatgctggcattaactacgctcgttttactctgccacttatcattcaacaaggcaggccaggccgcgctggcagacattcgatacccggcgctcaggctatcacccagaatcaataacgtgtccgctgcggcggcacggaaggttaacaggaccaggaacaggaagggcaaatgccagcggaaaacattgttgaagttcatcatcttaagaagtccgtcggtcagggggagcatgaactctccatcctcaccggagttgagctggttgtcaaacgtggcgagaccatcgcactggtgggcgagagcggaagcggtaagagtaccttgctggcgatcctcgccgggcttgatgacggcagcagtggcgaagtgagtctggtgggacaaccgctacataatatggacgaagaagcgcgggcaaagttgcgcgcgaagcacgtcggctttgtttttcagagttttatgttaattcctacccttaacgcgctggaaaacgtcgagcttccggctctgctgcgcggtgagagtagcgcggaaagtcgtaacggggcgaaagcgttgctcgaacagttagggctgggtaaacgtctggatcatcttccggcacagctttccggcggtgaacagcaacgagtggcgctggcacgagcctttaatggtcgacctgatgtgctgtttgccgacgaacccaccggcaaccttgaccgccagacgggcgataaaattgccgacctgctgttttccctcaaccgtgaacatggcaccacgttgattatggtgacccacgacctgcaactggcggcacgctgcgaccgctgcttacggctggtgaacgggcagttgcaggaggaagcatgattgcacgttggttctggcgcgaatggcgtagcccgagcctattaattgtctggctggcgctaagcctggcggtggcctgcgtgctggcgctgggcaatatcagcgatcgcatggagaagggcttaagccagcaaagccgtgagtttatggcgggcgatcgggcgttgcgcagtagtcgcgaagtgccgcaagcgtggctggaggaagcgcaaaagcgcggcctgaaagtcggcaagcagctgactttcgccacaatgacctttgcaggcgacacaccgcagctggcgaacgtcaaagcggtggatgatatctacccgatgtatggcgatctgcaaactaatccccctggcctgaaaccgcaggcgggcagcgtattgctggccccacgcctgatggcactgcttaacctgaaaacgggcgacaccattgacgtgggcgatgccaccttgcggattgccggagaagtgattcaggaaccggattccggttttaaccccttccagatggctccgcgtctgatgatgaatctggcggatgtcgataaaaccggagccgtgcagccggggagtcgggtcacctggcgttataaattcggcggcaacgagaaccagctcgacggctatgagaaatggttgttacctcagcttaaacccgaacaacgctggtacggtctggaacaggacgaaggcgcgctggggcgaagcatggaacgcagccaacagttcctgctgcttagcgcgcttctgaccttgctgctggcagtggcagcggtggcggtagcgatgaatcattactgtcgcagtcgctacgatctggtggcgatcctcaaaacgctgggggcagggcgagcgcaactgcgtaagctaatcgtcggtcagtggttgatggtgctgacgcttagtgccgttaccggtggggccataggcctgttgttcgaaaacgtgttgatggtgctgctcaagcccgttctgcctgctgcactaccgccagccagcctctggccgtggctgtgggcgcttggcaccatgacggtcatcagcctgctggtggggctacgaccatatcgcttgttgctggcaacgcagcctttacgcgtattacgtaatgatgtggtagcgaacgtctggccgctgaagttttatctgccgattgtcagtgtggtggttgtgctgctgctcgccggattaatgggtggcagcatgctgctttgggcggtgctggcgggcgcggtagtactggctttgctgtgcggtgtgctgggctggatgctgctgaatgtacttcgccgcatgacgctgaaaagcctgcctctgcgcctggcggttagccgcctgttacgtcagccgtggagtacgttaagtcagcttagcgcatttagcctctcctttatgctgctggcactgctgctggtgttgcgtggcgatctgctcgaccgctggcagcagcagctacctccagaaagcccgaactactttttaattaacatcgccacagaacaggtagcaccgctaaaagcgttcctcgcggaacatcagatagtcccggaaagcttttatccggtggtgcgggcgcggctgacggcgattaacgataagccgacagaaggtaatgaagatgaggcgcttaaccgcgaactcaatcttacctggcaaaatacgcggcccgatcataatccgattgtcgccggtaactggccgccaaaagccgatgaagtgagcatggaagaggggctggcgaaacgcttaaacgttgccctcggtgataccgtgacttttatgggcgatacccaggagttccgcgctaaagtgaccagcctgcgcaaagtggactgggaaagtctgcggcctaatttctattttattttccctgaaggggcattagacgggcaaccgcagagctggcttaccagtttccgctgggagaatggcaacggcatgttgacacaactcaaccgccagttcccgaccattagcctgttagatattggcgcgattttaaaacaggtcggtcaggtgctggagcaggtaagtcgggcgctggaagtgatggtggtactggtcaccgcctgcggtatgttgctgttgctggcacaggtgcaggtgggaatgcgtcagcgtcatcaggagctggtggtgtggcgcacactcggtgcggggaaaaaactgctgcgtaccacgttgtggtgtgagttcgccatgcttgggtttgtttccggcctggtggccgcaattggtgcggaaacggcgctggcagtgttgcaggcgaaagtgtttgattttccgtgggagccagactggcgattgtggattgttctgccgtgcagcggagcgctgctgctgagccttttcggcggctggctgggtgcgcgactggttaagggtaaggcgctgttcaggcagtttgcggggtgatgagagtccctcattaccgcgccttaacccattccgccacttccgcccactcaccgcgaaagacaactttttccgcttttttctcaagctgatagcgatacatcgggtcgtaatattcttcaagtaacggcaccagccaggccagatgaccgtcggtgctgccggtggtgagttgcgttgtcagtgctgcatccagccttgcagccagttcgttatagcgctgtagccccagccgacgcttaatcgcgctaagtccgtgatgcaggtattcgcaatactcctgccagccctgttcgtcgccgtacgcgtgggtaaaatcatgatgcatacgcaagaaatactcttcgttcaggcgctcaagacggatctcaaacggatcttctaccaccgcaatcgccgcctgagtcattcgctcgcgcaggcattccggcaggtgattgctaccgatcatccggctttcgtcttccagcacccacaggcgcaaattctgacgggcgtcggtttttagcatttcggcagccagcaggttttcaaaactcgcctggctaagttgtggttgtaacgtgcgaccaaacgcgctaccgcgatgacgcgccaacccttccagatcaacaccgttcggctgttgctgcactaacagcgttttaccgctgccggtacaaccgccaatcagcactatcggtttttgtgccagttcaatagtcgcctgaatcgcggtctggcgcagtgccttataaccgccttccaccagcggataatcaatccccgctgcatgcaaccagctttgcacaatatgactgcgctgaccgccacgggcgcagcagagaataccttgcggattttgcaggcacgctgcccgccaggcgtccatgcgctgctgacgaatttcacccgccaccagtttatgtcccagcgccagcgctgcgtcactgccttgctgtttatagcaggtgccaacggcggcgcgttcatcgttattcattaacggcagattgatagcggcgggcattgcgccgtgctcaaactcgataggggcgcgaacatcaataatgggcgtatcagcaatcagcagggcacgatagtcctgttccgtgtgtctctcttgcatagttaaaagtgaacctcaaatcagcttgcgcgctattttacgcgccaacgcgcaaggaaacttgatttttaactgcgtgggttgccgaaaatttctaaaaatccgctgatttccggcctgcgctgggtaaacaaggtcacaatatcttctaccgctttgccgctgccaaatttgcgccatgccagactcaatgggctaggagggcgcatcgttgggattacccggctgaccagttgttgattatcgatcatactctggcaaaggctttttggcaaaaaaccaatgccaacgcccgccagatgggcggcgattttcgtttccatatcgggaacaataatctctttttgccctggcaatcgccaggcgacgcgtttggttaaggtgcgggcgctgtcttcaatattgaccgccggaaagcgccgcaactgcgcttctgttagcggctcttcaacgttcgccagcggatgatccgccgccatgacaaagcgccattgcacgcttcctaagggatcaagactaaaggtatttgccagcgcctcagttcccgtgacgccgatagccaggctaaaaccttcgtacaataggctgtcccagacgcccatatagatttgtcgggagatgtgaaactgggtaaaggggtaacgctcattcagccacgccagcaactgggcgacggcctgggggttgtagagcaggttgttgatgacaatattcacctggcgttccacgccatcattcacctgttgcagctcgcttggcatactttccagccagctcagccagtctctggcctgggaaagtagatgctcgccagccgctgtcaacgtcacgctgcgagtcgtacggaaaaacagcgctactccggtattctcttccagaagtttaatgcgataactgatcgtcgccgtggttttacataatcgttctgccgctttactaaaacttcctgtttcagcaaccgcaatgaaagtccgcaaggtttctggatcgaacatcttcaggtatccccttttaaatccgcaagttgcgtgattttcttatcctctgatttatcagtatttttacatgataaccctgttcaatttgtggactaaatctagttttggaaaaatattccaacttttgtattgatgttgttctcttaaggttttagattgcctgttattgaaaccaagctgaccggtcggcggtggttgaacggaattatgttacaaggacaaaaagatgaaacttcaggtattaccgttaagtcaggaagcctttagtgcttatggcgacgtaatcgaaacgcagcaacgggattttttccatattaacaatggcctggtggagcgttaccacgatttggcgctggttgagattcttgagcaagactgtacgcttatcagcattaaccgcgcgcaaccggcgaatctgccgctgaccattcacgaactcgaacgtcatccgctgggtactcaggcctttatcccgatgaaaggtgaggtgtttgtggtggtcgtggcgttaggtgacgacaaaccagacctgagtacgctgcgggcgtttatcaccaacggcgaacagggagtgaattaccatcgtaacgtctggcatcacccacttttcgcctggcagcgcgtcaccgattttctgaccatcgatcgcggcggcagtgacaactgtgatgttgaaagtattcctgaacaggaactctgttttgcgtgacgcctgcaaccgacttgcataagataaactaattgttcattgtttatgctcacttgtaggtcggagttaacgtaggtatgacggaagttagacggcgcggcaggccaggacaggcggagcctgtggcacagaagggcgcacaggcgttagagcggggaattgcgattctgcaatatttggaaaaaagtgggggaagtagcagcgttagcgatatttctctcaatctggatttgccgctctccacgacctttcgcttgctgaaggttttacaggcagcggattttgtctatcaggacagtcaattaggctggtggcatataggattaggtgtctttaacgtcggtgcggcgtacatccataaccgcgatgtcctctccgtcgccgggccgtttatgcgccgcctgatgttactttccggcgaaacggtcaatgtcgcgatccgtaacggcaatgaagcggtattaattggtcagttagagtgtaaaagcatggtcaggatgtgtgcgccactgggcagtcgtctgccactgcatgcttccggtgcgggcaaagcgctgctttatccgctggcggaagaggagttgatgagcatcattctgcaaaccggtttgcagcagtttacgccaactacgcttgtggatatgcccaccttgctgaaggacctggaacaagcgcgtgaactgggctataccgtagataaagaagagcatgttgtaggtctgaattgcatagctagtgcaatttacgatgatgtcggtagtgttgttgccgctatctccatctccgggcctagtagtagactgacagaagatcgttttgtcagtcagggtgagctggtcagagacaccgcccgcgatatcagcacggcgttgggactgaaagcacatccataatgtctgtcgcatcccgctctgcggagcgggtttttttgacaaaatttgaaagttggaaaaattttccaataaatagaggtaggaataaaatggcaaaaatgagagccgttgacgcggcaatgtatgtgctggagaaagaaggtatcactaccgccttcggtgttccgggagctgcaatcaatccgttctacagtgcgatgcgtaagcacggcggtattcgtcacattctggcgcgtcatgtggaaggtgctagccacatggcggaaggttatacccgcgcaacggcagggaatatcggcgtatgtctggggacttccggtcctgcgggcacggacatgatcaccgcgctctattccgcttctgctgattccattcctattctgtgcattaccggccaggcaccgcgcgcccgtctgcataaagaagattttcaggccgtagatattgaagcaattgctaaaccggtcagcaaaatggcggttacagttcgtgaagcggcgctggtgcctcgcgtgctgcaacaggcatttcacctgatgcgttctggtcgtccgggtccggtactggtggatttaccgttcgacgttcaggttgcggaaatcgagtttgatcctgacatgtacgaaccgctgccggtctacaaacctgctgccagccgtatgcagatcgaaaaagctgtagaaatgttaatccaggccgaacgtccggtgattgttgccgggggcggggtaattaatgctgacgcagctgcactgttacaacagtttgctgaactgaccagcgttccggtgatcccaacgctaatgggctggggctgtatcccggacgatcatgaactgatggccgggatggtgggtctgcaaaccgcgcatcgttacggtaacgcaacgctgctggcgtctgacatggtgtttggtatcggtaaccgttttgctaaccgtcataccggcagcgtagagaaatacaccgaagggcgcaaaatcgttcatattgatattgagccgacgcaaattggtcgcgtgctgtgtccggatctcggtattgtctctgatgctaaagcggcgctgacactgctggttgaagtggcgcaggagatgcaaaaagcgggtcgtctgccgtgtcgtaaagaatgggtcgccgactgccagcagcgtaaacgcactttgctgcgcaaaacccacttcgacaacgtgccggtgaaaccgcagcgcgtgtatgaagagatgaacaaagcctttggtcgcgatgtttgttatgtcaccaccattggtctgagtcaaatcgctgcggcacaaatgctgcatgtctttaaagaccgccactggatcaactgtggtcaggctggtccgttaggctggacgattccggctgcgctaggggtttgtgccgctgatccgaaacgcaatgtggtggcgatttctggcgactttgacttccagttcctgattgaagagttagctgttggcgcgcagttcaacattccgtacatccatgtgctggtcaacaacgcttatctggggctgattcgtcagagtcaacgcgcttttgacatggactactgcgtgcaactcgctttcgagaatatcaactccagtgaagtgaatggctacggtgttgaccacgtaaaagtagcggaaggtttaggttgtaaagctattcgggtcttcaaaccggaagatattgcgccagcctttgaacaggcgaaagccttaatggcgcaatatcgggtaccggtagtcgtggaagttattctcgagcgtgtgaccaatattagcatgggcagcgaactggataacgtcatggaatttgaagatatcgccgataacgcagcggacgcaccgactgaaacctgcttcatgcactatgaataagggagataaataatgttacgtttctctgctaatttaagcatgttatttggagaatatgattttctcgcccgttttgagaaagctgcgcagtgtggttttcgcggcgttgaatttatgtttccttatgactacgacattgaagaattaaaacatgtgctggcgagtaataaactcgaacatacgctgcacaatttaccggcgggtgactgggcggcgggggagcgcggtattgcctgtattcctggccgtgaagaagagtttcgggatggcgtagcagcagcgattcgttatgcccgtgcgctgggtaataaaaaaattaactgtctggtcggtaaaacgccggctggtttcagcagtgaacagattcacgcaacgcttgtagaaaacctgcgttatgccgcgaatatgctgatgaaagaagatattttattactgattgaacctattaaccattttgatattcctggtttccatctcaccggaactcggcaggcgctgaaattgattgatgatgttggttgctgcaatttgaaaattcagtatgacatttatcatatgcagcggatggaaggtgaattaaccaacaccatgactcagtgggctgataaaattggtcacctgcaaattgccgataatccgcatcgcggcgaaccgggaaccggagaaattaattatgattatctctttaaggtaatcgaaaattctgactacaacggttgggttgggtgtgaatataaaccccaaaccaccacggaagccggtttacgctggatggatccgtaccgttaaaacgtaacgctattcagacaatgcttttttaggccgctaagttggcaggggatcgtgttgtctgaattcaggaaaagcgaaatttaaaagaggttaattatgaaactgggatttattggcttaggcattatgggtacaccgatggccattaatctggcgcgtgccggtcatcaattacatgtcacgaccattggaccggttgctgatgaattactgagtctgggtgccgtcagtgttgaaactgctcgccaggtaacggaagcaagcgacatcatttttattatggtgccggacacacctcaggttgaagaagttctgttcggtgaaaatggttgtaccaaagccagcctgaagggcaaaaccattgttgatatgagctccatttccccgattgaaactaagcgtttcgctcgtcaggtgaatgaactgggcggcgattatctcgatgcgccagtctccggcggtgaaatcggtgcgcgtgaagggacgttgagcattatggttggcggtgatgaagcggtatttgaacgtgttaaaccgctgtttgaactgctcggtaaaaatatcaccctcgtgggcggtaacggcgatggtcaaacctgcaaagtggcaaatcagattatcgtggcgctcaatattgaagcggtttctgaagccctgctatttgctagtaaagccggtgcggacccggtacgtgtgcgccaggcgctgatgggcggctttgcttccagtcgtattctggaagttcatggcgagcgtatgattaaacgcacctttaatccgggcttcaaaatcgctctgcaccagaaagatctcaacctggcactgcaaagtgcgaaagcacttgcgctgaacctgccaaacactgcgacctgccaggagttatttaatacctgtgcggcaaacggtggcagccagttggatcactctgcgttagtgcaggcgctggaattaatggctaaccataaactggcctgatacccgcaataaaaatggccgatatcagaaaatgaatcggccagcaatattaaaaaagaaagcagccaaagatgttgctagtgtattaaaaataatatttttattttatttgttcctcatagctagattaaaacaacgttatagcatacgtgaaattaagagggatttatggaacatcagagaaaactattccagcaacgcggctatagcgaagatctattgccgaaaacgcaaagccagcggacctggaaaacatttaactattttaccttatggatgggtagcgttcataacgttcccaattatgtgatggtcggcggcttttttattctcggcttgtctacctttagtattatgctggcaattatcctcagcgcctttttcattgccgcggtaatggtattaaacggtgctgcgggcagtaaatacggtgtgccttttgccatgatcctgcgtgcttcttacggtgtacgtggtgcactgtttcccggattattaaggggcggaattgccgccatcatgtggtttggtttgcaatgttacgcggggagtctggcctgcttgattctgattggcaaaatctggccgggatttttaactctcggtggtgatttcactctgttaggcctttctctaccgggcttaattactttcttaatcttctggctggtcaacgttggtataggttttggcggtggcaaagttttaaataaattcactgccattcttaacccgtgcatctatatcgttttcggcggtatggcgatttgggcgattagtctggtcgggatcggtccaatctttgactacattccgagcggtattcagaaagcagaaaacggtggcttcctgttcctggtggtgattaacgcggtagttgcggtctgggcggcaccggcggtgagcgcatccgactttacgcaaaacgcccacagctttcgtgagcaggcgctggggcaaacgctgggtttagttgtggcctatattctgtttgcggtcgccggggtatgtattattgccggagccagtattcactacggcgctgatacctggaacgtgctggatattgttcagcgttgggacagcctgttcgccagcttctttgcggtactggttattctgatgacaactatctccactaacgcgaccggtaatattattccagccggttatcagattgccgccattgcaccgacaaaactgacctataaaaacggcgtactgattgccagtattatcagcttgctgatctgcccgtggaaattaatggaaaatcaggacagcatttatcttttcctcgatattatcggcggaatgcttggtccggtaattggtgtcatgatggcgcattattttgtggtgatgcgcggacaaattaatcttgatgaactgtataccgcacctggcgattataaatattacgataacggttttaacctcactgcgtttagtgtaactctggtggccgttattttatctcttggcggtaagtttattcactttatggaaccgttaagccgtgttagttggtttgtcggcgtcatcgtcgcctttgcggcctacgccttattaaagaaacgtacaacagcagaaaaaacaggagagcaaaaaaccataggttaattaatcccgatattgaacattgagttaaaaaccaatctgtattttacaaggagtttgttatgtcttttgatttaatcattaaaaacggcaccgttattttagaaaacgaagctcgcgttgtagatatcgccgttaaaggcggaaaaattgctgctatcggtcaggatctgggcgatgcaaaagaagttatggatgcgtctggtctggtggttagcccgggcatggttgatgcgcacacccatatttctgaaccgggtcgtagccactgggaaggttatgaaaccggtactcgcgcagcggcaaaaggtggtatcaccaccatgatcgaaatgccgctcaaccagctgcctgcaacggttgaccgcgctagtattgaactgaagttcgatgccgctaaaggcaagctgactattgatgcggcacaactcggtggcctggtgtcttacaacatcgaccgtctgcatgagctggatgaagtgggcgttgtcggcttcaaatgcttcgttgcgacctgtggcgatcgcggtatcgacaacgacttccgtgatgtaaacgactggcagttcttcaaaggtgcgcagaagctgggcgaactgggtcagccggtgctggtgcactgcgaaaacgcgctgatttgtgacgaactgggcgaagaagcgaagcgtgaaggtcgcgtaaccgctcatgactatgtggctagccgtccggtatttaccgaagtggaagcaattcgccgcgtactgtatctggcgaaagttgctggttgccgtctgcacgtttgccacgtcagcagcccggaaggtgttgaggaagtgactcgtgcacgtcaggaaggtcaggacgttacttgtgaatcctgcccgcattactttgtactggataccgatcagttcgaagaaatcggtactctggcgaagtgtagtccgccgatccgcgatctggaaaaccagaaaggcatgtgggaaaaactgtttaacggtgaaatcgactgcctggtttccgaccactctccatgcccgccggaaatgaaagccggtaacatcatgaaagcatggggcggtatcgccggtctgcaaagctgcatggacgtgatgttcgatgaagcggtacagaaacgcggtatgtctctgccaatgttcggcaaattaatggcgactaacgcagcagatattttcggtctgcagcaaaaaggccgtatcgccccaggaaaagatgccgacttcgtcttcattcagccgaatagcagctatgttcttaccaatgacgatctggaatatcgccacaaagtcagcccgtatgttggccgtaccattggcgcgcgtatcacgaaaaccatcttacgtggtgatgtgatttacgacattgaacagggcttccctgttgcgccgaaaggtcaatttatccttaaacatcagcagtaatctggcccctgcaatgcccgtccttgcggcgggcattctccggttaaggtgtgtttatgttcaattttgcagtcagccgcgaaagcctgttaagtggatttcagtggtttttctttattttttgcaacacggttgtggttcctcctacgctactttctgcttttcagttgccgcaaagtagcctgcttacgctcacgcaatatgcttttcttgctaccgcactggcctgcttcgctcaggcgttttgcggtcatcgtcgcgctattatggaagggccaggtggcctgtggtggggaaccatccttactatcacccttggtgaagcaagccgcgggacaccgatcaacgatatcgccaccagcctggcagtggggattgcactctccggcgtgctgacgatgttgattggttttagcggattaggccatcgcctggcacggttatttacgccgagcgtgatggtcttgtttatgttgatgctgggcgcgcagctgaccactatctttttcaaaggtatgctcgggctgccgtttggcatagccgacccgaattttaaaattcagttaccgccgttcgcgctcagcgtggcggtgatgtgcctggtactggcgatgattatcttcctgccgcaacgttttgcccgttatggcctgctggtcggcaccataaccggctggttgttgtggtacttttgctttccttctagccacagcctctccggtgagttgcactggcagtggttcccgctcggcagtggcggtgctttgagcccgggaattattctgacggcggtgattacaggtctggtaaatatcagcaatacctacggtgcgattcggggcacggatgttttttatccgcagcagggcgcagggaatacgcgttatcgtcgtagctttgtggcgaccggatttatgacgctgataaccgtaccgctggcggtaattccatttagtccgtttgttagttccattggtttattaacccagactggcgattacacgcggcgtagctttatttatggcagcgttatttgcctgctggtggcgctggttcctgcactcacgcgactgttttgcagtatccctttacccgtgagtagtgcggtcatgctggtttcttatctgcctttactcttttccgcgctggtgtttagccagcaaataacgtttaccgctcgcaatatttatcgactcgcattgccgttatttgtcggcatatttttaatggcattaccgcctgtgtatctgcaagaccttccattaacgcttcgtcctctgctcagtaacggcttattggtcgggattttactggctgttcttatggataaccttattccgtgggaacgcatcgaataatttgttgaaaaaggattgataatgaagattgtcattgcgccagactcttttaaagagagcttaagtgcagaaaaatgttgtcaggcaattaaagccgggtttagcaccctctttcccgatgcgaactatatctgtttgccgatagcggatggcggcgaagggacggtggatgcgatggtcgccgcgacgggcggcaacatcgtgacgcttgaagtctgcgggccgatgggcgaaaaagtgaatgctttttatggccttaccggcgacgggaaaacggcggtgattgagatggcggcagcaagtggcctgatgctggtcgcgcctgaaaagcgtaatccgttgctggcctccagttttggtacgggggagttaattcgtcatgcgctggataacgacattcgccatattattctcggcattggcggcagtgcgacggtcgacggcggtatgggcatggcgcaggcgctcggtgtgcgtttccttgatgccgacggtcaggcgctggcggcaaacggtggtaatttagcgcgcgtggcaagcattgagatggatgaatgcgatccgcgtctggcgaattgccatattgaagtagcatgtgacgttgataacccgctggtaggggcacgcggcgcggcggcggtgtttggcccgcaaaaaggggcaacgccggagatggtcgaagaacttgaacaggggctgcaaaattacgcccgtgttttacaacagcaaactgaaattaatgtctgccagatggcgggcggcggcgctgcgggcggtatgggtattgcggcggcggtatttctcaatgcggatattaaaccgggcattgaaattgtgttgaatgcggtcaatcttgcgcaggcagtgcagggcgcagcactggtgattaccggggaagggcgcatcgacagccaaacggcaggcggtaaagcgccgctgggtgtggcgagcgtggcgaagcagtttaatgtaccggtgattgggattgctggcgtattgggtgatggcgtggaagtggtgcaccagtacggcattgacgcggtattcagcattttgcctcgtctggcacctttagccgaagtgctcgccagcggtgaaaccaatctcttcaacagcgcgcgaaatattgcctgcgccattaaaataggtcagggaattaaaaactaacccttacctttaaagcggatgcgatttatatcgcataagagtgcagtactcatgccggatgcggcatgagtaccatatccttcctgaaaatcgcgcaaattctatatattgcagagatcatgtaggcctgataagcgaagcgcatcaggcaatgttacaaaaaaagccacggtataaaccgtggcaaaatccaacatagctaaaaataatcaggcgagtggtatgacttaaatctctacgtcgcggttacaatctttgctgtaaatatagctgaacgcttcaccacgccctacaccataaccagcctgtaaagaataagcgcccataaagatgtaatcgccttttttcaccgggatccagttattgtcgaggttataaaccccctgaccggaaagaatataggcaccgtgttcctgaacgtgtgtttcgatataaccgtggctggcacctggtgcaaaagagaggatatgcatgttcatatcaaaacctaactctttgggcagaaaatccagcagaataacatcgtccatgccttcataatgaatgcgttccagttcgctggcattgccagaaaccagccacggtgcatagccttctaccggaacatagcggcgcttatataaaaagatttggctgtcttcggcctgggcgttaacaaacgtcattaaggagcctggcgggcaataaagatagccaccttcgcttaaggcaaatgttttgccttcggctttggcagtgatatttccagagatcacatacaggaacgtttcaatgccttcgccaccgaagccctgttggttgccaccgttttgatgcagtgtgaccagataatcaacaaaagaggcacccagctttggcgtggagaggattgtcgcgtcacaattttcaaagcccggaataatattttttaccagaccatccggggttaacagtgcgaaattaccgtgtttaacaatcgcacggttagccagtaaatcttcgcggtaaccggtgacgttatttaaatatcccatttatgactccttatttctgccaggcaagttgataaagcatgagtgccaacgttttgaccccttcggcaaggtcggtaatattggtgcgttccgccgggttatggctgatcccgttgatgctggggataaaaatcatgcaggttggtacgcgaggcgcgaaaatttgcgcgtcgtgcccggcaccactgtgcatcacccggtaattcagtttttctctttcacacaattctgtcagggtggcgaccagctccttattcatcggcacgggttcttcgtccatccataaatcgatatcaataccaatgtccatttcatcgcaaatcgcccgcatgtcgttttctaactgttgggtgaaatcgcgcagcacggcagcgtcggtatgacgacaatcaatggtgaacgtggttttacccggcaccacatttaccgtattcgggcgcggctctactttgccaaaggtcagaaccagcggatcgcccatccttttcgctttttcgacgctctgatggcaaatgcgactgaaagcgtaaactgtatcacgacgataacccatcggcgtggtgcctgcatggttactttcgccgttcagcgttaccgtataacgacgctgcccgacaattgcattcaccacgccaatactttgcccattactttccagcacacagccctgttcaatatgcagttcaacaaaggctttaatatcctgacgcggagttagtggggcgttcggaagagtaaatccgcaagccttcatcgcatcgacaaaactatttcctttggcatcacagatattccgcacgtcgtcaggattcgccagcccaaaaatatttttactgccccagaagacatacgggaagcggctgccttcttcttctgccatcgccaccacttcgaccgtacgtagcggcgcgccgtattgcgttttcagccagtcaattgccagccacgccgccagcgcgccgaattgcccgtcaaggttaccgccgttaaccacggtatcgatatggctaccgctcagaaccacttcctgtggatattcggtgccattcaggcgaccgtataaattccccacttcatcgaaacgtgtttccagcccgcttgctgccattctttttttaaattgctgctgggtttccagccattccgggctataaagtaaacgggtcatcccacccgctgggtcagcgccaaaagaggaaagccagggcagcgtttcttctatagcttgacggaaatgtgtaatcataagaaagtcctgtctcaataattattgcgcaaagggatttttcgtttcgtaactcgtgttataaagcgcgtcggaaattaaatactggtaaatatcatcaacaatttcgatgccttcgacggcggctttgcgttgtttaatatcctgatcctgtccgggataataaacctgattaaaaccgggcgcgggggtaatggcatttaattcgcgcatggtctggctaagatgttgacggaataattcgctggaggagaaaaagttcggattaataactatatgtaattgccccaaattacgccctgcgtgtaaatcgtcatacatgctactaacctgtcgcccgaacggtaagccgagtaagacgccactgaggacgtcaatcatcatcatcaggccatacccttttggcccggcggcggggagcagagcatgtaccgcgaacggatcggttgttggtacaccgtttttatcgaccgcccaggtatccgggatagacatattacggctgcgggcgtcgagcacttttccccatgcctgtacggtagtcgccatatcaaaggtaaggatctcgtcgccttctcccggcgcggcaaaggccagggggttagtaccgtagtaaatttccgcgccgccaaacggcaccaccattggatcggactggcacatgctaatgccaatgaatccggcgcgggctgcctgctgcacaaaataagagattgcgccgctgtgacccatccggctgataccgaccaccgcaacgccattttgctgggcggttttgatggcatgttccatacccattttcgccgcgacctgtccggcggcattgtcggcatgtaaaattgcgctgcacggcccggtttcctcaagacgaaactccggttcgcggttggtgccgcctttactaatgcgttccgcgtagtattccacgcgcaccgcgccatgagagtggatccctctggcatcggcgtaaaccaatacttcagccacggttgcagcgtgctcacgttttaacccagcctggcagagtttattctcaattagctggtggagtgtttcccgactgattttcatctgtcttcctttttaacgacggtgtgaagcatgactgcaattaacatacagggaaaatatctggattatgtgatccagacaggcaaaaaaatatagttagaatttatttgataatccgctcacttttaacctgatttttaaaacaacaacgcttattaaaaaataatgagtaatagcctggtggttatttgaattcttttgttaataattcctgtgtgatattcatcaccttatttactcgttgtcatcgataccgtaatcgccacattaacactgctcgtgcaattgccatgggtgcaatttttaaggagttgttatgatccacgcctttattaaaaaagggtgttttcaggatagcgtcagtttaatgattattagtcgaaaactcagcgaaagtgaaaatgttgatgatgtttccgtaatgatgggtacgcccgccaataaagcgttattagataccacaggtttctggcatgacgattttaataacgccacgccgaacgatatttgcgtggcaattcgtagcgaagcggcggatgcggggatcgcgcaggcgattatgcagcagcttgaagaggcgctaaaacaactggcgcaggggagtggcagcagccaggcgttgacgcaggtgcgtcgctgggacagtgcctgtcagaaattacccgatgccaatctggcgctgattagtgtggctggcgagtatgcggcggagctggcaaaccaggcgctggatcgcaacctcaacgtgatgatgttctccgataacgtcacgctggaagatgaaatccaacttaaaacccgcgcgcgggaaaaaggcttgctggtgatggggccggactgcggtacgagcatgattgccggcacaccgctggcttttgctaacgtgatgccggaaggcaatattggcgtcattggcgcttccggtaccgggattcaggagctgtgtagccagattgcgctggcaggggagggaattactcacgcgattggccttggcgggcgcgacctcagccgtgaagtgggcggcatcagtgcgctaacagcgctggaaatgctcagtgcagacgagaaaagcgaagtgctggcatttgttagtaaaccacctgccgaagctgtgcgtctgaaaattgttaatgccatgaaagcaaccggcaaaccgacggtggcgctgtttttaggttataccccggcggtggcccgcgacgagaatgtctggtttgcctccagcctggatgaggccgcacgcctggcttgcctgcttagtcgcgtcacggcgcgacgtaacgcaatagcgcctgtcagcagcggatttatttgcggtttgtataccggcggtacgctggctgccgaagcggcgggattacttgccggacaccttggcgtggaagccgacgatacccatcaacatggcatgatgctggacgccgatagccaccagattattgacctcggcgatgatttctacaccgtcgggcgtccccatccgatgatcgacccaaccttacgcaaccagttaattgccgatctcggcgctaaaccgcaagtgcgcgtgttgctgcttgatgtcgtgattggcttcggtgcgaccgccgatcctgccgccagcctggtgagcgcctggcaaaaagcctgtgccgcgcgtttagataatcaaccactgtatgccattgccacggtgacaggcactgaacgtgacccgcaatgccgcagccagcaaatcgccacgctggaagatgcggggattgcggtcgtgagtagcctaccggaagccaccttgctggcggcagcgttaattcatccgctcagccctgccgcacagcaacacacaccgagtttactggaaaacgtcgccgtgattaacatcggattacgcagctttgcgctggagctacaaagcgccagcaaaccggttgtgcattaccaatggagcccagtcgccggtggcaataaaaaactggctcgtttattagaacgtttgcaataaggggttcccatgtttacatcagtggcgcaagccaatgctgcggttatcgaacaaattcgtcgcgctcgtccacactggctggatgtgcaaccggcttcttcacttatcagcgaactaaacgagggcaaaacactgcttcacgccgggccgccaatgcgctggcaggagatgaccggacccatgaaaggggcgtgcgtgggcgcatgtctgttcgaaggttgggcgaaagatgaagcgcaggcgctggcaatactggagcagggggaagtgaacttcattccttgtcaccatgtgaatgccgtcgggccaatgggcggtattacttctgccagtatgccgatgctggtggttgagaacgtgaccgacggcaaccgggcgtactgcaacctcaacgaaggtatcggcaaagtgatgcgttttggcgcttacggcgaagatgtcctgactcgccatcgctggatgcgcgatgtgttaatgccagtattaagcgcggcgctggggcgcatggagcgcggtatcgatctcacggcgatgatggcgcagggcattacgatgggcgatgagttccatcaacgcaatattgcttcctctgcactgttaatgcgtgcgctggccccacaaattgctcgcctcgatcatgataaacagcacatcgccgaagtgatggatttcctcagcgtgaccgatcagttcttcctcaacctcgcgatggcttactgcaaggcggcgatggatgctggcgcgatgatccgcgcaggcagcatcgtcacggcaatgacccgcaacggcaatatgttcgggattcgggtaagcgggctgggcgaacgctggtttactgcgcctgtaaacactccgcaaggtctgtttttcaccggcttctcgcaggagcaggcgaacccggatatgggcgatagcgcgattaccgaaacctttggtatcggaggtgcggcaatgatcgcagcgcctggcgtaacgcgctttgtcggtgcgggtggcatggaagcggcaagagcggtatctgaagagatggcggaaatttaccttgaacgcaatatgcagttgcagatcccaagctgggattttcagggcgcgtgcctggggctggacattcgtcgcgtggtagaaaccggcattacgccactcatcaataccggtatcgcccataaagaggcggggatcgggcagattggcgcaggcaccgtgcgggcaccgctggcgtgctttgaacaggcgctggaagcactggctgaaagcatgggtattggttgaggaacgcgcaatgacgatcatccatcctctgcttgccagtagtagcgcaccgaattatcgccagtcctggcggttagcgggagtgtggcggcgggcgattaacctgatgacggaaagcggcgaactgttaacgttgcatcgtcagggtagtggtttcggccccggaggatgggtgcttcgccgtgcgcaattcgatgcgttatgcggtggattatgcggcaatgaacgaccacaggttgtggctcaagggattcgcctcgggcgtttcacggttaaacagccacagcgttattgtttgctgcgtattacgccgcctgcgcatcctcaaccacttgcagctgcatggatgcaacgcgcggaggaaaccgggcttttcgggccactggcgttggcggcaagcgatccgctgcctgctgagttacgccagtttcgtcactgttttcaggccgcgctcaatggcgttaagaccgactggcggcactggctgggtaaaggccccggattaacgccgagtcatgatgacacgctgagcggaatgctgctggcggcctggtattatggcgctttagatgcgcgctccggtcgtccgttttttgcctgttccgacaatctgcaactcgttaccacagcggtgagcgtcagttatttacgttatgccgcgcaaggatatttcgccagcccactcctgcactttgttcatgctctgagttgcccgaaacgtaccgctgttgcgattgatagcctgctggcgctggggcatacgagtggggcagatacgctgctggggttctggcttggccaacaattattacaaggaaaaccatgaaaacactggttgtggctcttgggggcaacgccttactccagcgcggtgaggcgctgacggcagaaaatcaatatcgcaatatcgccagtgctgtacccgcgctggcacgcctggcccgttcttatcggttggcgattgttcacggcaacgggccgcaggtggggctgctggcattgcagaatctggcgtggaaagaggtagaaccgtatccgctggatgtgctggttgcggaaagccaggggatgattggctatatgctggcgcagagtttgagcgcacagccgcagatgccgcccgtgacgacggtgctgacgcgcattgaggttagccctgatgatccggcgtttttgcagccagagaaatttattggtccggtttatcagccagaagaacaagaggcactggaagcggcttacggctggcagatgaaacgtgatggtaaatatttgcgccgggtggtggcgtctccgcaaccgcgtaaaattctcgacagcgaagccatcgagttgttgctcaaagaggggcatgtggtgatttgcagtggcggcggcggtgtgcctgtgacggatgacggagcagggagtgaagcagtgattgataaagatctcgccgctgcgttgctcgccgagcagattaatgcagatggactggtgatcctcaccgatgctgatgcggtatatgaaaactggggaacgccgcagcaacgtgccattcgccatgccacaccggatgagttagcgccatttgccaaagccgatggtagcatggggccgaatgtaacggcggtgagtggttatgtcagaagccgtggtaaacccgcgtggattggggcgttaagccgaattgaagagacgctggcgggcgaagcggggacctgtattagcctgtaatcgtaggcattagacatttgtgcctgatgcgacgcttgacgcgtcttatcaggcctacaaccggtgccgcatccggcaattggtgcacaatgcctgatgcgatgcttgacgcatcttatcaggcctacaatgggtaccggatcggtaggccggataaggcgtttacgccgcatccggcaagaatagagcaccagttaaccgaacttactctgcgcccaaatcacgccgctggcatattccggcggcagcagcgggattaaggcttccagcgtcgcagtcagacggcttgtgtcgctgtcggtcaaattcagatgccccactttacgccccggacggacttctttgtcgtaccagtgcagatgcaccagcggcagtttcagccagtcataattcacatcgctaccaatcagattgatcatcacgctcggattattcaccactggttgcggtaacggcagatcggtaatcgcccgcagatgcagctcaaactggctgatgctggcaccgttttgtgtccagtgaccgctgttatgcacacgcggtgccagttcgttgatcaacagaccttgcggggtgacaaaacactccatcgccatcacgcccacatagcccagctcctgcataatcgcgctcagcatctcttcggcttgcgcctgctgctgtgcgttggcctgcggaaaagcgacgctggtgcgcaaaataccgtcctgatgcaggttatgcgtcagcggataaaacacggtgctgccatcaaagccgcgcgcgccaaccaggctcacttcaccagagaagttaatgccctgctcgacaatacattcgccgtaacactctgccggtaactgttcggtttcatttgcgcgtaaacgccattgaccgcgaccgtcataaccaccagtgcgacgcttaacaatcgccagctcacctaaacgatcaaacaccgcaggccactcgctgcgttcggcaagtaactgccacggtgcagtcggcaggtggagcttatcgaaaagctgcttctgagtcagacggtcagcaataatcgggaacacatcgcggttcacaaaggccggatggcgcgccagctcgcgggttaatgcggtttccggccagcgttctatctcagcggtaatcacgctttgttgaaaaggcaccgccgccggttcagcgtccagcccgactggccagacagcaatgcctaacggttcgcctgcctgacgcagcatacggcctaactgcccgttaccgaggacgcaaacctgtttcatgccgcacctcgcgggtccgggttttccagcacttcgtcggtctgggctttgcgccagtcattcagacgctggtgcagttctttatcatgagtcgcaagaatttgtgctgccagtaacgccgcgtttgccgcgccagctttaccaatcgccagcgtacccaccggaatgccgcgcggcatttgtacgatggagtagaggctatcgacaccgctcagtgcggcgctctgtactggcacgcccagcaccggcaccagcgttttggcggcaatcatgcctggcagatgcgctgcgccgcctgcgcccgcaataatcacctgataaccgttctcttcggcgctttcggcgaagctgaacagtttatcgggggtgcggtgagcagaaaccacttcaacgtggtgcgggacattcaggatttcgaagatttcggcggcgaactgcatggtagcccagtcgcttttggaccccatcacgatggcgacacgcgccggattattgcgggaagacatgcgtcttaaaactcctgtggtgcacaactctcggctttagagggcacagagaatagcacggaaagagagcaaggaaaacggttgcgtggctgtgaaatcagcaaagttgcgggttttttaaaacggaaaatgaatcagctcaacgtcatccgccgtgactttcaccatactaccttccgtatgccaggcacccagtaccacgcgaaaagcaggttgctgattggcgataagttcatgcaccgccgggcgatgggtatgcccgtggatcagccattgcacctgatgtttttccatcgcactgaccaccgcgttttggttaacgtccatgatcgccaggcttttactgctgttggcttctttgctgttcgcgcgcattcgcgcggcaatgcgtttgcgcacaaacaacggcagggcgaggaatagcgtctgcagccagggtttgtggaccttggcgcgaaaagcctgataacccgcgtcatcggtgcacagcgtgtcgccatgcataatcaacacccggcgaccataaagttcgagcaccttttcttccggcaataacgtcatgccactttcacgggcaaagcgtttgccgagcagaaaatcacggttgccatgaatgaaataacagggaacgccggaatcggacaccgctttgatcgccgccgccatcttgcgatggagtgggttgggatcgtcgtcgccaatccatgcttcaaacagatcgccaagaatatacagcgcgtcggccttgcgggcttcccccgctaaaaaacgcagaaaaccggcggtgatcgccggttcttccacgcagagatgaagatctgcaataaagagtgtcgccacgattactcgctaacggtcacgctttcaatgataacgtcttcttttggcacgtcctggtgcataccgctacgaccggttgcaacacctttgattttgtctaccacgtccatgccgtcaaccacttcagcaaacacgcagtagccccaaccttgcaggctttcgccagagaagttcaggaagtcgttatcaaccacgttgatgaagaactgtgcagttgcagagtgcggagcctgagtacgtgccattgccagcgtaccacgggtatttttcaggccgttgttggcttcgtttttgatcggttctttggtggctttttgtttcatgcccggttcaaaaccgccgccctgaatcataaagccgttgataacacggtggaaaatggtgttgttgtaaaaaccttcgcggcagtagtccaggaagtttttaactgtttcaggtgctttatcgtcaaaagttttgatgacaatatcgccgtgattggtgtggaaagtaaccatttttgcatcctgttccgtttgattggtgcttcaacccagttcgggtcatatatagggtggtgttatagcataaccgcacgatcggatcatcacgcaatgtatgctgattcgcgcgggaaatatgggtattatacgcaactcaattacccacacatgtctaaacggaatcttcgatgctaaaaatcttcaatactctgacacgccaaaaagaggaatttaagcctattcacgccggggaagtcggcatgtacgtgtgtggaatcaccgtttacgatctctgtcatatcggtcacgggcgtacctttgttgcttttgacgtggttgcgcgctatctgcgtttcctcggctataaactgaagtatgtgcgcaacattaccgatatcgacgacaaaatcatcaaacgcgccaatgaaaatggcgaaagctttgtggcgatggtggatcgcatgatcgccgaaatgcacaaagattttgatgctttgaacattctgcgcccggatatggagccgcgcgcgacgcaccatatcgcagaaattattgaactcactgaacaactgatcgccaaaggtcacgcttatgtggcggacaacggcgacgtgatgttcgacgtcccgaccgatccaacttatggcgtgctgagccgtcaggatctcgaccagctgcaggcaggcgcgcgcgttgacgtggtcgacgacaaacgcaacccaatggacttcgttctgtggaagatgagcaaagagggcgaaccgagctggccgtctccgtggggcgcgggtcgtcctggctggcacattgaatgtagcgcaatgaactgcaagcagctgggtaaccactttgatatccacggcggcggtagtgacctgatgttcccgcaccacgaaaacgaaatcgcgcagtccacctgtgcccatgatggtcagtatgtgaactactggatgcacagcgggatggtgatggttgaccgcgagaagatgtccaaaagcctgggtaacttctttaccgtgcgcgatgtgctgaaatactacgacgcggaaaccgtgcgttacttcctgatgagcggccactatcgcagccagttgaactacagcgaagagaacctgaagcaggcgcgtgcggcgctggagcgtctctacactgcgctgcgcggcacagataaaaccgttgcgcctgccggtggcgaagcgtttgaagcgcgctttattgaagcgatggacgacgatttcaacaccccggaagcctattccgtactgtttgatatggcgcgtgaagtaaaccgtctgaaagcagaagatatggcagcggcgaatgcaatggcatctcacctgcgtaaactttccgctgtattgggcctgctggagcaagaaccggaagcgttcctgcaaagcggcgcgcaggcagacgacagcgaagtggctgagattgaagcgttaattcaacagcgtctggatgcccgtaaagcgaaagactgggcggcggcggatgcggcgcgtgatcgtcttaacgagatggggatcgtgctggaagatggcccgcaagggaccacctggcgtcgtaagtaattgcgctattgccggatgcgagttttcgcatccggttatcgtctgcgccaccacaacattcccatcagtagcatccccggcaaccacacccacatcaattcagaaataatcacctgatgcccgtacggcgtggtgtaacgagacaatgcaaacggcgcgacttttatcacctgccagggagcgaaaaagcgttcatcactccacggccacagccagccaacgcctttaccgccagtggttacgctatccagcaagctgtggcttagcaagctgacggttaaaaacagccagcagcgaatcagcccagccctgaaccatcggcgtccaataaacacacataacagcgggacaacaaacgcaaacaccaggctatgggtaaacccgcgatgaccaaaaacattgccgtaagcaacgccaaatttaaagctcaatacgtcggcgtcgggcagcatcgccaggatgattccggcaaataacagacgcggagggatgactttgctacccaaccctaaaccaatgcataggggaacggcggcgtgcgtaataacggttggcatgatggtcgcttcggcaaaatgtcgatgctatcagcatggatgaacggggcgtagagggcaaaagtctgaaaagagaaccggcctgttgatacaggccgggaaagggatcaggcaacaacctgtacgctgtgacctgcaaaactcactgtctgaccggcgacgattttgcagcgtttgcgcgtttcaaccgcaccgtcgactttcacctggccttcggcaatcgcgattttcgcctgcgcgccgctttcgctccagccttccagtttcagcaagtcgcacagctcaacgtgcggatgtttacctaaagaaaatgtcgccatgttactcatcctgtggatcatgatattcaacgcacgcctgtagcgtgttttcaatcagcgtggcaaccgtcatcgggccaacgccgccgggaacaggcgtaatgtaactggcgcgtttagccgcgtcttcaaacacgacgtcgcccacaactttgccattttccagacggttgatgccgacatcaatcacaattgcgccttctttgatccagtcaccgggaataaagcctggcttgccaacggcaacgatcaatagatcggcattttctacgtgatgacgcagatttttagtgaagcggtgagtcactgtagtggtgcaacctgccagcagcagttccatgctcatcgggcggccaacgatattgcttgcgccaatcaccacggcgttgaggccgaaggtatcaatgttgtaacgctcaagcagcgtgacgataccgcgcggggtgcagggacgcagacgcggcgcgcgctggcacagacgaccgacgttgtaaggatggaaaccgtccacgtctttgtccggatgaatacgttccagcactttgacgttatcaatacccgccggtaacggcagttgaaccagaatgccatcgatggtgttgtcggcattcagcgtatcgataagctccagcagctccgcttcgctggtggtttccgggaggtcataagagcgggagacgaacccgacttcttcacaagccttgcgtttgcttgcgacataaatttggcttgcagggttactacccaccagcacaacggccagtcctggtgcccgcagtccggctgcaatacgcgcctgaactttttgagcaacttcagagcgcacctgctgcgcaatcgttttaccgtcaataatctttgctgccatcagagagaggattccatctgttacgtagatcgaaggggatgcgcctattttgtcagaagcggggcgcgctgtcaggtttcgtttcagatttatcgcgtgaagcgacctcttgcgaaggtgaggcgcaccgtcgctgagactgaaagcttcatttttcgtccatgatggcgttgtaaatctggaactgatttatttccttgtctaaggattaagataatttaagaaatacctgacaatataaaaagaattttcagcctggtaatttaccgcttcaggtctatatttgtgttgaatatattttgcgcggaagtattcatctaacggggctctctattttttagaatagagtgcatattttcaattaagacattcttagaggataaaaaggaatttactactatcagtgtcttaaataaagtaatcggttatatacggatgtggagtcgataaatgagattgaaggaatatatatgaaattaagatttattagctctgcgctggctgccgcactattcgccgctacgggtagttatgctgccgttgtagatggcggtacaattcactttgaaggcgaactggtgaatgctgcctgtagtgtgaatactgacagcgcagaccaggttgtcacactcggtcaatatcgtaccgatattttcaatgctgttggtaatacctctgcattaattccattcaccattcagttgaacgactgcgatcctgttgttgccgctaatgctgccgttgcattttctggtcaggctgatgcaatcaatgataatttattggccattgcatccagtaccaatacaacaacagcaacgggtgtcggtattgaaatacttgataatacatccgcaattctcaaacctgatgggaatagcttcagtaccaaccagaacttgatccccgggaccaacgttcttcatttttctgcacgttataaaggcaccggtacaagtgcaagtgcagggcaagcaaatgctgacgcgacttttattatgagatatgaataatcaaaaccacgttgttttgaattatatatcacgtcttataacaaagtaatgtaccggttgtctgaagcggtatggtggcaatgtaaatcgaaatcatgttcactttgtatcatgccgctttattaaatgaaaagggaatgatgtgttgtaagaaaccaaagcaatcatttctttatattccttatttttgccgtcaggaatacacaaggcgtattaactatgatgactaaaataaagttattgatgctcattatattttatttaatcattagcgccagcgcccatgctgccggagggatcgcattaggtgccacgcgtattatttatcccgctgatgctaaacagactgcggtatggattagaaatagccataccaatgagcgctttctggtcaatagctggattgaaaacagcagcggtgtaaaagaaaagagtttcatcattacaccgccactgtttgttagtgaacccaaaagcgaaaatactttgcgtattatttacaccggtccaccgctggcagcagatcgtgagtctctgttctggatgaatgttaagacgatccctagcgtagataaaaatgcattgaacggcaggaatgttttgcaactggcgattttaagccgcatgaaattatttctccgtccaattcaattacaagaattacccgcagaagcgccggacacactcaagtttagccgatccggtaactatatcaatgttcataatccaagtcctttttatgtcaccctggttaacttacaagtgggcagccaaaagttggggaatgctatggctgcacccagagttaatagtcaaattcccttacccagtggagtgcagggaaagctgaaatttcagaccgttaatgattatggtagtgtaactccggtcagagaagtgaacttaaactaaccgaatcatctgacaatatcagagctaattatgaaaatacccactactacggatattccgcagaggtatacctggtgtctggccggaatttgttatagttctcttgccattttaccctcctttttaagctatgcggaaagttatttcaacccggcatttttattagagaatggcacatccgttgctgatttaagccgctttgagagaggtaatcatcaacctgcgggcgtgtatcgggtggatctctggcgtaatgatgagttcattggtagccaggatatcgtatttgaaagcacaacagaaaatacaggtgataaaagtggtgggttaatgccctgttttaaccaggtacttcttgaacgaattggccttaatagcagtgcatttcccgagttagcccagcagcaaaacaataaatgcatcaatttactgaaagctgtacctgatgccacaattaactttgattttgcagcgatgcgcctgaacatcactattcctcagatagcgttgttgagtagcgctcacggttacattccgcctgaagagtgggatgaaggtattcctgctttactcctgaattataatttcaccggtaacagaggtaatggtaacgatagctatttttttagtgagctcagcgggattaatattggcccgtggcgtttacgcaacaatggttcctggaactattttcgcggaaatggatatcatagtgaacagtggaataatattggcacctgggtacagcgcgccattattccgctgaaaagtgaactggtaatgggagacggcaatacaggaagtgatattttcgatggcgttggatttcgtggtgtacggctttattcttctgataatatgtatcctgatagccagcaagggtttgccccaacggtacgtgggattgcccgtacggcggcccagctaacgattcggcaaaatggttttattatctatcaaagctatgtttcccccggcgcttttgaaattacagatttgcacccgacatctagtaatggcgatctggacgtcaccatcgacgagcgcgatggcaatcagcagaattacacaattccgtatagtacagtgccaattttacaacgcgaagggcgtttcaaatttgacctgacggcgggcgattttcgtagcggtaatagtcagcaaagtagccctttcttttttcagggtacggcactcggcggtttaccacaggaatttactgcctacggcgggacgcaattatctgccaattacaccgcctttttattagggctggggcgcaatctcgggaactggggcgcagtgagcctggatgtaacgcatgcgcgcagtcagttagccgacgccagtcgtcatgagggggattctattcgcttcctctatgcgaaaagcatgaacaccttcggcaccaattttcagttaatgggttaccgctatagcacacaaggtttttatacccttgatgatgttgcgtatcgtcgaatggaggggtacgaatatgattacgacggtgagcatcgcgatgaaccgataatcgtgaattaccacaatttacgctttagccgtaaagaccgtttgcagttaaatgttagtcaaagtcttaatgactttggcagcctttatatttctggtacccatcaaaaatactggaatactagcgatagtgatacgtggtatcaggtggggtataccagcagctgggttggcatcagttatagcctcagttttagctggaatgaatctgtagggatccccgataacgaacgtattgtcggacttaatgttagtgtgcctttcaatgttttgaccaaacgtcgctacacccgggaaaatgcgctcgaccgcgcttatgcctcctttaacgccaaccgtaacagcaacgggcaaaatagctggctggcaggtgtaggtgggaccttactggaaggccacaacctgagttatcacgtaagccagggtgataccagcaataatgggtacacgggcagcgccacggcaaactggcaggccgcttacggtacgctggggggcgggtataactacgaccgcgatcaacatgacgttaactggcagctgtctggcggtgtggtcgggcatgaaaatggcataacgctgagccagcctttaggggataccaatgttttgattaaagcgcctggcgcaggcggtgtacgcattgaaaatcaaactggcattttaaccgactggcgcggctatgcggtgatgctgtatgccacggtttatcggtataaccgtatcgcgcttgataccaatacgatggggaattccatcgatgttgaaaaaaatattagcagcgttgtgccgacgcaaggcgcgttggttcgtgccaattttgatacccgcataggcgtgcgggcgctcattaccgttacccagggcggaaaaccggtgccgtttggaagtctggtacgggaaaacagtaccggaataaccagtatggtgggtgatgacgggcaagtttatttaagtggtgcgccattgtctggtgaattactggttcagtggggagacggcgcgaacagtcgctgcattgcgcactatgtattgccgaagcaaagcttacagcaagccgtcactgttattagcgcagtttgcacacatcctggcagttaaaggaaattatcaataagataatctgcagattattattggcgatggcatgtttgtgtctggcaaacatatcctgggctactgtttgtgcaaatagtactggcgtagcagaagatgaacactatgatctcagtaatatctttaatagcaccaataaccagccagggcagattgttgttttaccggaaaaatccggctgggtaggtgtcagtgcaatttgtccacccggtacgctggtgaattatacataccgtagttatgtcaccaactttattgttcaggaaactatcgataattataaatatatgcaattacatgattatctattaggtgcgatgagtctggttgatagtgtgatggatattcagttccccccgcaaaattatattcggatgggaacagatcctaacgttagccaaaaccttccattcggggtgatggattctcgtttaatatttcgtttaaaggttattcgtccctttattaacatggtggagatccccagacaggtgatgtttaccgtgtatgtgacaagtacgccttacgatccgttggttacacctgtttataccattagttttggtggccgggttgaagtaccgcaaaactgcgaattaaatgccgggcagattgttgaatttgattttggtgatatcggcgcaagcttatttagtgcggcagggccgggtaatcgacctgctggtgtcatgccgcaaaccaagagcattgcggtcaaatgtacgaatgttgctgcgcaggcttatttaacaatgcgtctggaagccagtgccgtttctggtcaggcgatggtgagcgacaatcaggatttaggttttattgtcgccgatcagaacgatacgccgatcacgcctaacgatctcaatagcgttattcctttccgtctggatgcagctgcggcagccaatgtcacacttcgcgcctggcctatcagtattaccggtcaaaaaccgaccgaagggccgtttagcgcgctggggtatttacgcgtcgattatcaatgaggtacggagaatgagaagagtactctttagctgtttctgcgggctactgtggagttccagtggatgggcagttgaccctttaggaacgattaatatcaatttgcacggtaacgttgttgatttctcctgtaccgtaaacacagcggatattgataagacggtagatttaggcagatggcctacgatacaactactgaacgctggcgataccacggcactcgtcccttttagcctgcggctggagggatgtcctccgggtagtgttgcgattttatttacgggaacgccggcatccgataccaacctgctggctctggatgatcccgcaatggcacaaaccgtcgccatcgaattacgtaatagcgatcgctcccggctcgcactgggggaggcgagcccgactgaggaagtagatgcaaatggcaatgtcacactaaacttttttgccaattatcgagcgttagccagcggtgttcggccaggtgtggcgaaagcggatgcgatatttatgatcaattataattaatattatattaattcgtataatttggcgtagtcgataagctctacaatactatgcaaacctagcttgccataaatattagatttatgcgcactaactgttttattgctaagtaataacttatcggcaatttctttattagataatccgctaaccagataacgtaatatggtcacttcacgattagatagcacagtgaccgtactactattcgtactacatttattgctttttatatagttaagcgtttcgctgggaaaaaacgtgtatccggagaggatcatctgaacggcatgaaaaatatcattctgatcattgcatttactgacaaaaccgttagcaccagcttgtatcgctctgccagcataaaagcattcacttttgctacttaaaaataacactttcactgtgctctggatttgtttgatccttttcaggaaggtaaaaccgtctgttccgggcaagtctatatccataatgattaaatcaacaggacgggttcggagataatcgatggttatgcgataatcatccgttttcaggacaatctgcaattcactgtttttttgcaacagaacttcaatagacattctgatgataggatgagtatccataatgatcacgctcgttggtttcatagttaccagtctcataggagcggacaattttccgttaggtcgggaaattgtactttgatacatgaaaatacgggttttcttgattcagacgcgcagcggtgtgcgtttgtttgccgctatagcgaaataaatcagaaaatcagacgcggtcgttcacttgttcagcaaccagatcaaaagccattgactcagcaagggttgaccgtataattcacgcgattacaccgcattgcggtatcaacgcgcccttagctcagttggatagagcaacgaccttctaagtcgtgggccgcaggttcgaatcctgcagggcgcgccattacaattcaatcagttacgccttctttatatcctccataatttcagagtgggacatatttgggacattatcaccaaaaatgtcgtctattttcctcgcatgctctgtcaaatgattaggcgcaaggtgagcatacctacgaaccatttctatggactcccatccgcccatttcctgaagcactgataatgggacgcctgactgaatcagccagcttgcccaggtgtgtctgaggtcatggaaacggaaatcttcctcatttatgcccgtcttatccgtttccgctttgcccttcaccacatcactttttgtcgctgtttggcgagataattcaacggtgtcaggccgtaaaacgccttaaaaacagagataaagtagctcgtgctgctatagccacataattgcgccacctgagtgatatttttgttatccatcaataacatctgtacggcgtaacgcatacgacactctgtgacaatctggctatagctggtattttcgttttttaatttctttttgagcaggctggggcttaaacataggctactggcgacaattcgcagattccagtaatgctgaatatcgctttgaataatgcggcagacgctgtcgcggacgctgctgcgtaagatatacatcagtagggcaataaaccggctttgctcaagaaagttagacaatacggtaaaaagcaatgcgcgcgtcaactccgcttcgcagggtctgctgggttgctgcttgctgtggttggcggctagccggaacacttccggtgtacggctatgacaagcgataaccggggttgccagccggctccagggctttacacaggttaagttcttatttaaaaacaacagataatcgttgatgatgttacggttgatgtgggtgattaatacgtgatttaacgtactgagttcaatgacgttattgttgcacgcgaaggcggccaggtagtttttcggaagggtaaacgtagcatggttattgacgcttacctctacctctttttcggtcaggatcaccacgcaaggttcactgctgctcaattgcatttcgcactcctcagatatcagaaactccgctcaaaggatctatgcttcctgcatgagtgatcggcccgttcgccgataacgatcttctttctttagcacgctttttagcaattaatcttgatggaattctgatgagagcgaaagaggtaagccaggtcgtacccgacttacctggaggagatttaatactcgagaatgccgtgcgcgacgggcaaatagcgcagagagaaatagagagtgtctttaccgcaagaggaacgtttcgctaacaggctggcaatttctgcgtccggtttcggtttcgctgtaaaggttttgcctttgccggcgacaaaaagttcataaacaacgccgctggcaggggcgggactttggcaatcggcgctggcctgtaaataacgttcacgctgttcagcggtcagtttatccacgccgctgccatcctgtacccagacattaacgccggttgctttaacgtgttccagcagttggcgatagccatcggggctcatgtttccggcgaaaaaactactgatataaaccggttttgcactaacatcgctaatcagccgctgcgcgttgtttaaccatgttagcaaaggctgacgggcggcttcgctgcgccagttcaggtcgtcaatttccgcgctgatgtaccagccatccggcgttatgccaggcgcggcgctccataatctggcttgctggagatcggcagccagcaggcgattaagatagctttccagcgctgcggagctctgtttctggtgcataaaaaattccggatcggcgttcagcccgacaataagcttcagaccagcctgttgcgcagctgcggcccgcttaaacaataacgtgcgctgttctggctgggtaaatgcatcgccgtaacgggtccattgcaaaacaagggtatcgaagccttgcaaacgtaactgactcatcagcccctgccactgggtatcggtaacctgactatctcggttttgtggttgccagataatacctttcatcgcaaaggaaaaagggctgaccaaaagcagtgtcagcaatacgaaaatgaacttacgcatttaccagtgcactccaatggtgagaaacgcgttgttgcgctctccgttacgttgattaatcgccttaaaggtatgttgatactcgacgccgagactgactttgtgcggccaggcgtcgtagtgcgtctcgccggtccagatattccagcggaccccgactccgccaagctgcgcgccctgagtgcctttatcacgatagccgttgtcctgaacgtgagcgtaaggctcaatagtctgtccgttagctaccttctgatgccagctgacgcgataatctgccgtccacgcctgaatatcctggcggatatattgcgccgcatcgaggtacaggttttgggcaaaccagccactaccgttcgggtgccattcgtcgctgtatttgccgccattaaagaaactggcgctggcgcgcagcatggtatcggatgcgccattttggccgttcagcggcaactgctgttcgacggcgatgaaaaagatctgatcgcgcagcggcttccagcgcagaccggtgccggacatcggatttttcaccggcatcatcaccccgttttctccggtatcggcaaagacgcggctataaacactgagcaggtcgccttccagcagcatattgcgtccgatgcggtactcggcttccagttgtccgtagctacgatagcttttccctggcgctgcgccgccgacattattgttagcggtactcattgcgccggaacgcaagccgatggaagaatcgaaactgaacgtccagcggcgaccgacctcctcatgcaaacggcggaaattgaagcgttgttgattttgttctggggtcagtggggttatcagcgcctgattatcaatgtcatcaatcaccagccgggcgtagtgctgcgtcgcaggcatgtcatccagacgctggttcacgtaggccagttgtcggatcagtgccggatcgtccggaagccctttatgcgccggttcgagcatttcccggctctgtgcgatatcaccgctatcccacaaggcgtaaccaagcgctgcctgggtgttgctattattcggttccagttccagcgcggcgcgcaaatcactcaccgcggccgggacattatgacgttggcgataaattgtcgcccgcgcaacgtaagcgttggcagaaggcgcaatattgatactgcgcgtgagatcgttcagtgcgagttccggctgaccaggaatgtaacgttgcgcatgcagccaccagtagagggcattgcttcccagtccacgtttttctgcctgttgtagccagcgatcgcgagccgcaccatttcctgccgcctgggcggtattggcagcagcaagcagatcctcattgctcatgtcgtgaagactgattttctgccaggccgccagtgcggtggcgtagtcctcaacctgatacgcctgataggctaccgcacgatgttgccaggcgctcggttgtcgttgttcggcctgaagccatgcatacaacgccacaccgggtagcgtgtcccgataacactttgccagacggttccaggcggcggcatcgtaggaagggctcatatcgcccagcaagcgaactattgccgggcaattatctgcaatacccggcaactgactttgccactgacgttgctccgccagcggtaagggtttgcttaaaatcgccaccttcgccggcgttgccaggtaaggatgactttccagcagagacgccagtcgcgccattaaagtctggctgacacgcgcatcgccctggaaaggatagcgttgcagcaataaatcggcagcttcgcgactctgctcgttctgcatcagttgccaggttagttgatccaggcgggtaagatttgccggttcttgctgatacagcaatcgtgccagacgcagagcttcagccttgttacgggtcgccacgctgacagcataacgctcctcaagcatttcattggcggggagggtggcgagcagtttttgcgctgcgtcgtactgaccttcttttaacagcaccggtagcgtcgcgccaacaacatactggcggttgtcggcaaactgtaccgtataattcgccaacgcctgaacggggttagcgctgtatttagataacagatagagccaacttttctcttgtgcgtccgtggtaaatagtggcttattttcaatgagataatgctggaggcgtgctttttcgccacgataagccagcgcggtcgcgtaagtaatataactctgaggatcggtgaagatcccctgactttgcagtgccaggatccgatcgtccagctgcccggcaagaagcacgtcaaaccactgacggcgttctgccgcgcttaatgtgttctgctggcgtgcttcattgtatagcgtatctgcctgggaccattgtttcaggtagattgcccgttgcagcagatcggttcgcagcgtttttccttccgggcttgcagcaaacgtcgcatcgttcagttgcgctctggcgacaggtaactgtgccagccgcagggcattctgcccgacttcactgcgacaacgcagggtcggcgcagcatcgcacgctttttgctgggcaagcagttcttcaactgtcgtaacgcttttcacttcaaccggaatagccgccagactgcgctcaagtcgggcatctcctgggtgacgtttcagttgatcctcaagcaacagccgcgcccggtcatcatgaccaaaatggcgataggcttccgcaaggtataaagtcagcggaatattatccggcacctgctggtgtatatattcaaattcgcggatggcggttgcttcgtcgttatttttctgtgccttcagcgctttatcgagacggggataaataacaaaatggcgataatcgctcagccccagctcttctgcgctggtgccgatattgtctgcgagtgcgctggtactcaataaagacgtcagcagtaaaccagaccatccgatgacgcgattaaggttattctccttcattttcggactccagttgcgcaacctgttctgtgtttaaacctgctttgagtaatagactttgcatgctaacttgtaattcgcgttgaattgtcaggacgcgatccaacgtttcctggctgataacgccttcggtgaccaaaaacttgccgagcggcagagaactgcgttcatggcgcaataacaacacgttaattgcactacgattaatatgaccgagcgtggtcagtatttcggcgaacaggaactgatgcggcacatattgccgccagatttcaccggcctgctgttccgtgagccactgatgctgaaccgcattgtacaacattgcccgcggatcgtgaccgcgtcggcgtgcataccagtgacgtaaccctgtgacaatttgtccccgcagaacaatgacgtaacgcactttgcgtccgactttacgcgtcagggccgccaggctaaccgggtcaataccatcttcactgccgacaattaactcgtcattttccagacgcagcggcagtaccgcataatgcagcgccacggaggccggcatttcggcaatcaggctggaagggatctgccaggcatcgatggattcccacgccacgccgttttgctctgccagcgcctgtgccagctgctcggcgctaatcagcccctgcatcagcatactaccgcccaggcgtagaccttcgacgcgattacgcagtgctgtatcgagttgttcttcagtgatgacctgattttccagcagaatttgacctaacgggcgcaagctgcgggtatcgccagtcacgctggggaagtcatgcgttgttttatcccacgccacgcgacgtggatcgccgtgttgaagtacctgttttagcgcgcgccagttggccatgaagttaatcaggttgccccagaaaagacgcaggacggaaagcagcccctgcgtcaggccgtagtagccagtaacgaaaatcacccgctgcacgatgcggttaaccatcaaaccaaagtttagccacagcagggtcattaaccatgcgctgccgctgaaaatagaaaggaaatgccaggcatcgggccacaaactttcatacgccagcaacagcaaaagctggatcatcaccagcatcgcgaggaagctgacaaagttactgattgcccctttgcggtcgcgccagagaaagtagttcagcgtcaggctggaggtccatttatgggttttaaagccttggaaaacaatgccgatgatccagcgggatttttgtcgaaccgcagtgctaaaggtatcggggaaatattcgcgcacgcagatcatgttacttgtccgcgcgtgctgtaaaaatttacgctgctcgcgttctttggcttcgtccaccaccggaaaacggacaaaaatttccgtcatacctttttctttcaggcggaagccaatgtcgtaatcttcagtaagactctgcacgtcgaaagcaataccgtcaccgtcagctaacagtgcggtcacggcgcggcggctgaaacaggtgccgacgcctgcgctgggcacttgtccggcgagggcttcacgcaccggaacatctttgccatgcagctcactaaactcatcaatgtaagtcatgctggtgaagtgcgtccattcgcgttcgaacggatacaccgggatctgaatcagatctttacgctcgaccagatagttgaacagacgcaattccatcggactaatcacatcttcggcgtcatgcagaataaaaccagcaaaagcgaaattggcgctacgctcaaattgggtgatggcgtccagcacgttgttcagacagtcggctttgctggtggggccaggacgcgcgcagactaccttatgcacattcgggaagcgagcgcacacttcgtcaacatcacgctgagtatcggggtcgttggggtaggtgccaacaaagatatgatagttttcgtagtcgagcgtggtcgccgccagctcggccatattgccgatgacgcccgtttcattccacgccggaaccataatcgctaacggtttttcatctggtttatacagttcgcggtaactcattcgcgggtagcggcgataaacactcaacttgcgtttaatgcggcgtacccagtagacgacatcaataaaaaaatcgtccagcccgctgatgaacatgatgaccgctaacgttatcgcgattacttttaagccgtagagccaggtagcaaaaacatcaagaagccagtccacacaaaaaccttacattaacgctggttatgtttagggtggcgtatattaaggttttttatgaattgtgacagctttttaccattaataggtatgactattgcggcacgttatttttacactggttataaaagttgccgtttgctgaaggattaagcgggtaatgtgataacaaaccttgtcccccgcgcatcgctcgttaccgcaaccgtgcctttatgcgcgacaacaatgcttttcactatcgccaggccaataccgctaccttcaccttttcgctggcgggaggggtcaacgcgatagaaacggtcaaacaatcgcggtaagtgctcgggcgcaatgggcgtaccggggttttcgacgataacttgcaccaggtgatcgaccgtctgacagcgcactacaattgtctctccggttggcgtataacgcagggcgttgctaagcaggttgcttagcgcccgacgcagcatcagcggatcgcccgcgacctgacacttgtcgccaacaaaccgcaactccacgccgcgatcttccgctaacgcctcgaaaaaatcgaacactttgccgacttcatccgccaggttgagcattttcttttcggggattagctggttgttatcggcctgagcgagaaacagcatatcgctgaccattttcgccattcgcgtcagctcttcgagattagagtagagcacatcttccagctccttctggctgcggctctggctgagggcgatttcggtttgcgttatgagattcgtaattggtgtgcgaatttcgtgagcgatatccgcactgaaattggactggcgggtaaagacatcctcaatacgctcgatcatatggttgaagctcagtaccagctgttccagctcaatgggcacggtctgcgggtcgaggcgaacgtcgagatctttgctggtaatattctggatttgacggctgacgctgcggatcggcgcgtgacctttatgtaccgccaacagtacgataaagacgatcaggatgctgattacgcttgcggtcataataagtttattcatcaaatcatttatgtaatgaagatgaaaatcgatgctaagcgcgatgtagagcgtataaatcggtttgccgtccaccaacgggccaaccggcaagttaatcatccgccagttgctgtgttccatatgcccgtgaccgtggcctggcatcatcatcgtcgggccggaaaggagatacacctcgccaccctgagcgtctttatcgggtatggcgtcacgcgtaaactcgcggatatccggcgcaccgggggagtgatacaccgttttaccctgactatctgccagggaaatcaacacattggaataaccactgacgatatcttccagcgtcattaagcgtcgggcttgcgtttcgtcagggtgatttagtacccgttcaagggtggcgctaatctcttttaaatcattaatatcctgctcggcaaaatgaacttttacactgtggatcatgatccatgcaaaggcgaaaaacgccgcgatggtggccaggctgataaaaaaggtcaggcgggttgccaggctaaacgggcgctgaaatggcttactgaccatccggcacctcaagcatgtaacccacgccgcgcacggtctgaattagcttcggctcaaagtcgttgtcgattttgccgcgcagccgcttcaccgccacatcaatagcattggtatcgctgtcaaaattcatgtcccatacctggctggcgataaggctgcggggcagcacttcgccctgatggcgaaggaagaactccagcagagtaaactctttactggtcaaagtgatgcgcgtgccgctgcgggtgactttgcggctgacgagatcgaccatcaaatcggcaacctgaaactgactttcgataatcaccgccgccccgcgccgcagtaatgtgcgcacccgcgccagcagttcagcaaaagcgaatggcttcaccaggtagtcatctgcccccaactccagccccttgacgcgatgttcaatggtgccaagcgcggtaagcaacagaatcggcatccctttattggcggagcgtaacatgcgcacgatatcccagccgttcacgtccggcagcataatatcgaggattatcagatcataatcaccggtcatcgccagatggtagccattcagcccgttgtcggccaaatcgaccacaaaaccggcttcggttaaccctttggtcaagtattctccggttttcttttcatcttcgacaatcaacagtttcatatttcctccgcatgttgcccgggcaattctagagtagcgggatcagatggcaatcgcttattggcaaaatgacaattttgtcatttttctgtcaccggaaaatcagagcctggcgagtaaagttggcggcataaaatcaccagaaattatgagcctatgtctccttgtaaacttctgccattttgtgtggcccttgcgctaaccggttgtagtctggcaccggattatcagcgtccggcaatgcccgtgccgcagcagttcagtctcagccagaacggcctggttaacgcagcagataactatcagaacgcgggctggcgcaccttttttgttgataatcaggtgaagacgctgattagcgaggcgctggtgaataatcgggatttgcgcatggcgacgctgaaagtgcaggaggcacgggcgcaatatcgtctgaccgatgccgaccgctacccacagctcaatggcgagggcagcggcagctggagcggtaatcttaaagggaataccgccacgacacgggagtttagcaccggccttaacgccagctttgacctcgattttttcggtcgcttaaagaacatgagcgaagccgagcgacaaaattatttagccactgaggaagctcagcgcgcggtgcatattctgctggtttctaatgtcgcgcaaagctatttcaatcagcaactggcgtatgcgcaattgcaaatagccgaagaaacgctgcgtaattatcagcagagttatgcgtttgtcgaaaaacaactgttgacaggtagcagtaatgttctggcgctggaacaggctcgcggggtgatagaaagtacccgcagcgacatcgctaaacgtcagggggaactggcgcaggcgaataatgcattgcaactgttgctgggaagctacggcaagctgccgcaagcgcagacagtaaacagcgacagcctgcaaagcgttaaattaccggcgggattgagcagccaaatcttattgcagcgcccggatattatggaagctgaacacgcgttaatggcggctaatgccaatattggcgctgcacgcgcggcattttttccgtctataagcctgaccagcggaataagcaccgccagtagcgatctaagcagtttatttaacgccagcagcgggatgtggaattttatacccaaaattgagatccccatttttaatgccggacgcaaccaggccaatctggatatcgccgaaattcgccagcagcagagcgtggtgaattatgaacagaaaatccagaacgcctttaaagaagtggcagatgcgctggcattacgtcaaagcctgaacgatcaaattagcgcccagcagcgttatctggcaagcctgcaaattactttgcaacgggcgcgggcattatatcagcacggcgcagtaagttatctggaagtgctggatgccgagcgttctttatttgcaacccgacaaactttacttgatctgaattatgcccgtcaggttaacgaaatttctttgtataccgcacttggtggcggttgacagcaatatactcgtcatacttcaagttgcatgtgctgcgtctgcgttcgctcaccccagtcacttacttatgtaagctcctggggattcactcgcttgtcgccttcctgcaactcgaattatttagagtatgacttttaactccaggagagaataaatgaaaaaagcactgcaagtcgcaatgttcagtctgtttaccgttattggctttaatgcccaggctaacgaacatcatcatgaaaccatgagcgaagcacaaccacaggttattagcgccactggcgtggtaaagggtatcgatctggaaagcaaaaaaatcaccatccatcacgatccgattgctgccgtgaactggccggagatgaccatgcgctttaccatcaccccgcagacgaaaatgagtgaaattaaaaccggcgacaaagtggcgtttaattttgtccagcagggcaacctttctttattacaggatattaaagtcagccagtaacccaggtttaatgagatgaaaaaaatcgcgcttattatcggcagcatgatcgcgggcggtattatttctgcggcaggttttacctgggttgcaaaggcggaaccgcctgcagaaaaaacgagcaccgcagaacgtaaaatcttattctggtacgacccaatgtatcccaatacgcggttcgataaaccaggtaaaagcccgtttatggatatggatctggtgccgaaatatgccgatgaagagagttctgcgtctggtgtgcgcattgacccgactcagacgcagaatctgggggtgaaaacggctaccgtcacgcgcggaccgctgacttttgcccagagtttcccggcgaatgtcagttacaacgagtatcagtatgccattgtgcaggctcgcgctgccgggtttatcgacaaggtgtatccgcttaccgtgggcgataaagtacaaaagggcacaccgcttctcgacctgaccattcctgactgggtggaagcgcagagtgagtatttactgctgcgcgaaaccggcggtacggcgacccagactgaaggcattcttgagcggctgcgactggcgggaatgccggaggcggatattcgccgcctgatcgccacgcaaaaaatccagactcgctttacgctcaaagcgcccattgatggcgtgatcaccgcgtttgatctgcgcgcgggaatgaatatcgccaaagataacgtggtagcgaaaattcagggtatggacccggtgtgggtcactgctgcgatcccggagtctatcgcctggctggtgaaagatgccagccagtttaccctcaccgttccggcgcgaccggataaaacactcaccatccgcaaatggacgctgctacctggcgtggatgccgcgacccgcacgctgcagctgcgtctggaagtcgacaacgccgacgaggcgctaaaaccgggcatgaacgcctggttgcaactcaacaccgccagcgaaccgatgctgctcattccgagtcaagcgctgattgataccggcagcgaacagcgggtgattaccgttgatgccgacgggcgctttgtaccgaaacgcgttgctgttttccaggcaagccaaggcgtcaccgcattacgctctggtctggcggaaggtgaaaaggtggtttccagcggcctgttcctgattgattccgaagccaatatttctggcgcactggagcggatgcgctctgaaagtgcgacccatgcgcattgagggaataaccaatgattgaatggattattcgtcgcagcgtggcgaaccgttttttggtgctgatgggcgcgttgtttctgagcatctggggcacctggaccatcattaatacgccagtggatgcgctgccggatctctccgatgtgcaggttattattaaaaccagctatcccggtcaggcaccacaaatcgttgaaaatcaggtgacttatccgctaaccaccaccatgttgagcgtgcctggcgcgaagactgtgcgcggtttcagtcagtttggcgactcttatgtgtatgtcattttcgaagatggcaccgatccgtactgggcgcgtagccgggtgctggagtacctcaaccaggtacagggtaagctgcctgcgggagtcagcgccgagctggggccagatgccacgggtgttggctggatctatgaatatgcactggtggatcgcagcggtaagcacgatctggccgatttacgcagtttacaggactggtttctcaaatatgagctgaaaaccatccctgacgttgcggaagtggcgagcgtgggcggtgtggtgaaagagtatcaggtggttatcgatccccagcgcctggcgcagtatggcatcagtctcgccgaagtaaaaagcgcgctggatgctagtaaccaggaagcgggcggtagcagcatcgaactggcggaagcggaatatatggtgcgcgccagcggctatctgcaaacgctcgacgactttaatcacatcgttttaaaagccagtgaaaatggcgtgcccgtttatctgcgcgatgttgcgaaggtccagattggcccggagatgcgccggggcattgccgaactaaacggcgaaggcgaagtggcgggcggggtggtgatcctgcgatccggcaaaaacgcccgagaagtgatcgccgccgtgaaggacaaactggaaacgctgaaaagtagtctgccggaaggcgtggagatagttacaacatacgatcgcagccagctcattgaccgcgccatcgacaacctcagcggcaagttgctggaagagtttattgtggtggcggtagtctgtgcgctgtttctctggcatgtgcgcagcgcgctggtggcgattattagcttgccgctggggttgtgtattgcttttattgtcatgcacttccagggactgaatgccaatattatgagcttgggtggcattgcgattgccgtcggggcgatggtcgatgctgctatcgtcatgatcgagaatgcgcataaacggctggaagagtggcagcaccagcatcctgacgccacgctggataataaaacgcgctggcaggtgatcaccgatgcgtctgttgaagtggggccggcgctatttatcagtctgctgattatcacgttgagctttatcccgatcttcaccctggaagggcaggaagggcgtctgtttggcccgttggcgttcaccaaaacgtatgcgatggcgggtgcggcgctgctggcgatcgtagtgatcccgatcctgatgggctactggatccgtggcaaaattccgccggaaagcagtaacccgctcaatcgctttttgattcgtgtttatcatccgctgttgctgaaagtactgcactggccgaaaaccacgctgctggtggcggcgcttagcgtgctgacggttctctggccgctcaataaagttggcggggaatttttaccgcagatcaatgaaggcgacttgttgtatatgccaagcacgctgccggggatttccgcagcagaggcggcgagtatgctgcaaaaaaccgacaagctaattatgagcgtacctgaagtggcgcgggtatttggcaaaaccgggaaagcggaaaccgccaccgattctgctccgctggagatggtagaaacgaccatccagcttaagccgcaggagcagtggcggccaggcatgacgatggacaaaatcattgaggaactggataacaccgtgcggctgccggggctggcgaatctgtgggtgccgccaattcgtaaccgtatcgatatgctcagtaccggcattaaaagccccatcggcattaaagtttccggcactgtgctggcggatatcgacgcgatggctgagcaaattgaagaagtagcgcgaacggtgccaggcgtagcttctgcgcttgccgagcggctggaaggtgggcgctatatcaacgttgagattaaccgtgaaaaagccgcacgttacggtatgacggtggcggatgtgcagttgtttgtgacttctgcggtgggcggggcgatggttggcgaaacggtggaagggattgcccgttatccaattaatctgcgttatccgcaaagctggcgcgatagtccgcaggcactgcgccagctgccgatcctgacgccgatgaagcagcaaatcaccctggcagacgtggccgacattaaagtctctaccggaccgagcatgctgaaaaccgagaatgcgcgcccgacgagctggatttatatcgatgcccgcgatcgtgacatggtgagcgtggttcacgatttgcaaaaagcgatagctgaaaaagtgcagttaaaaccgggcaccagcgtggcattctccgggcagttcgagctactggagcgcgccaaccataagcttaaactcatggtgccgatgacgttgatgattatcttcgtgctgttgtatctggcgttccgtcgggtgggcgaagcgttgctgattatcagcagcgtaccgtttgcgctggtgggcggcatctggttgctgtggtggatgggctttcatctttccgtggcgacgggcactggctttatcgccctcgccggggtcgccgccgaatttggcgtggtgatgctgatgtatttacgtcacgccatagaggccgtgccgagcttgaataatccacaaacattcagcgagcagaagctggatgaggcgttatatcacggcgcggtcctgcgcgtgcgcccgaaagcgatgacggtggcggtgattatcgccggtctgctgccgattctgtggggaacgggggctggtagtgaggtgatgagccggattgccgcgccgatgattggcggcatgatcaccgcacctttgctgagcctgtttattatcccggcggcgtataagctgatgtggctgcaccgacatcgggtacggaaataaaagcaggataccccgtttaaccgtgtggattgtgtcttgcgacgatgggcactaaatgttaaaaggtgcccctcaacaaaaaagacacacaggggaaaggcgtgaaaaacgcgagtaccgtaagcgaagatactgcgagcaatcaagagccgacgcttcatcgcggattacataaccgtcatattcaactgattgcgttgggtggcgcaattggtactggtctgtttcttggcattggcccggcgattcagatggcgggtccggctgtattgctgggctacggcgtcgccgggatcatcgctttcctgattatgcgccagcttggcgaaatggtggttgaggagccggtatccggtagttttgcccactttgcctataaatactggggaccgtttgcgggcttcctctctggctggaactactgggtaatgttcgtgctggtgggaatggcagagctgaccgctgcgggcatctatatgcagtactggttcccggatgttccaacgtggatttgggctgccgccttctttattatcatcaacgccgttaacctggtgaacgtgcgcttatatggcgaaaccgagttctggtttgcgttgattaaagtgctggcaatcatcggtatgatcggctttggcctgtggctgctgttttctggtcacggcggcgagaaagccagtatcgacaacctctggcgctacggtggtttcttcgccaccggctggaatgggctgattttgagcctggcggtaattatgttctccttcggcggtctggagctgattgggattactgccgctgaagcgcgcgatccggaaaaaagcattccaaaagcggtaaatcaggtggtgtatcgcatcctgctgttttacatcggtagtctggtggttttactggcgctctatccgtgggtggaagtgaaatccaacagtagcccgtttgtgatgattttccataatctcgacagcaacgtggtagcttctgcgctgaacttcgtcattctggtagcaagcctgagtgtgtataacagcggggtttactctaacagccgcatgctgtttggcctttctgtgcagggtaatgcgccgaagtttttgactcgcgtcagccgtcgcggtgtgccgattaacagcctgatgctttccggagcgatcactagcctggtggtgttaatcaactatctgctgccgcaaaaagcgtttggtctgctgatggcgctggtggtagcaacgctgctgttgaactggattatgatctgtctggcgcatctgcgttttcgtgcagcgatgcgacgtcaggggcgtgaaacacagtttaaggcgctgctctatccgttcggcaactatctctgcattgccttcctcggcatgattttgctgctgatgtgcacgatggatgatatgcgcttgagtgcgatcctgctgccggtgtggattgtattcctgtttatggcatttaaaacgctgcgtcggaaataaggcattcacgctacatccgacaaaacgatgtcaaccatccgaaaccgctctcatccattcgatgagagcggtttttttaattactgcttaaatgcacccgccagagagcgaatatcattgccggttggcgagtaatccccgcatatccggttgtcaggtcaggatggtaaggcacctgctttacactttcgcccgtggtcagtgatggctgcgggcgaatcgtaccagatgttgtcaattaatcgtgttggcacagcgttatgactatcttttcttttatctgccagtgcacagcaaacatctcattctcacgatgaatgatgacctgctgtttattccagctaattatctgatagtccagaaaacctgcatcagtttggatctcacttgccttaaatgcgctctctttggcggaaaatgccagtgtcagcgccagagaaaaggctaaaccgcagtctgcgagtcgctcgtgttccgctggtgtaataatgttgtctgtcaattctcttgcggtttgtacagaaaaaatttcttctatatcaatgccaatcggttgacgagataccacggctaatgccgtagtcccacagtggctaatactgccgtatacctccgcaggccagacaggttggcgtagctcgccgattgcgggcacacatttatagccatattcccgcaaagcataaacagcagcgatccgtccggctaaatgctctgttttacgtttacgtccagcgtgttgcagttgtgcgtagtgcggcagccagagtaaatcctgctcacaaaaattcgccggatcgaactcaacaaaatgcagcgtatgtccggcaaaggggagggaggtatgcgtagttttcatatcgaccatattcgagactgatgacaaacgcaaaactgcctgatgcgctacgcttatcaggcctacatggtcctgcaatatattgaattggcaagatttttgtaggccggataaggcgttcacgccgcatccggcatgaacgacgcgcactttgtcaacaatctgacgttagcatcagaagtgggtgtttacgctcatataccacgtacgtcccggctcgttataggtatacgccccggcaccggcgatatagttggcccctgccgaatcgcccgtggtctgggcattacccgcacgccacaaacgtttgtcgaacagattgtccacgccgccggtcagactgacattcttcgtcacatcccaggtcgcgctcaggccaacaatgctgtaaggactaatttctttggtttccggtccaaccgctggctgacctttatagttgtacttcttcggctgctgcttgccgtaccaggtgaaggtcgtttgcatgctcaaatcttcccgtgcctgccagctcagcgtactgttcaacgtatactccgggatgatgctcaaacggtcgcccgtggttttgttttcactcttcagcatataagtgatgttattggtccacatcaccgtttcgctaaccggtacgtttaagcttccttccagaccttcaaccaccgctttcggcacgttatcccactgatagagatcggtgccgactgcgttttgccctacagccacatagcccgcttcaatcttattgcgataatcgttacggaaccaggtgacgcccgccagccacccgtcgcgtttgaactccagaccaatctctttgttgatgctggtttctgctttcaggtcatcgttaccttgcagatagcagccgcccgcgctggcatagcaaccctgacctttactgtagagaatgtagttcgggttagtctggtacaggctcggcgctttataagcacgggcgatgcccattttcagcgtgaagtcatcgcctaaaccttggcttatgttcagcgccgggctccagttattgccgacaatactgtgatgatcgaaacgcagccccggcgttacgatggtgctgtcagtcagctccatgttgttttcggcaaacaggctgaaaatttctgctttactatacgggctacggtcggtggtactcacgccatcaatagcgccaccggtattcgttccggtcagtgcctgggtgttggaacttaagtccttcatccgttgctgattccactccgtacccagcgtcagcgtctggttaacgaggaaatcaatcggcaggttaacttcgctgtgcagcatcacgtcatcaagatcgatatcgacgaaatcctgtgtcgctttttcgttaaatttcccttcggtaccgcccgccagaccttccggaatacggctgttacgggtgtgttcgtactgcacccagttgctggtggtcacgccgttatcccagccaccgttccaggtcagcgcgtagttctggcgatacagacggttggtttcatcgccatatttgctgcgggtataggaatcggagttggtattctgggtgtcgcccgcatacaggttaccctggcggctgtaacctgcttccagttccaggctttgcaatggcgcgaaatcccagcgcaccacgccattaatatctttgttgattaccccttcgcgcccggctggtaacgtcgtggcatacgttccggcacgcgcggactgatggccctggttgatatcccacgcgtcagcctgggttttgtcgaggttgccatacaaacggaagctgaattcgtcgcccagcggaccggtcaggctaaagttagtgcgtttggtggcaccttcctctttatgttctggcgcattgaaatatgcgtcccaggagccgtgccactcgccgctgccttttttggtaatgatgttaaccacgccgcccgccgcgccgttgccataacgcgcagctgccggaccacgcagaacttcaatacgttcaatcatttcaggtggcacccaggaagtatcaccacgggtatcgcgctcgccacgccagccctgacgcacgctgttacggctgcttaccggcttgccgtcaatcaaaatcagcgtgttttccggacccataccgcgaatatcaatctgtcggttattcccacgctgaccactggtggagttaccggtcaggttaacgcctggcatggtacggatgatcttgctcacatcgcgggcaaccgggtttttgcggatttcatctgcggtgatggtgctaacgccaggcgcctgtaagttctgctcggcggcggtaacgacaatagtatcgtcatgactaacaggagtatcggtcggctcttgtgcctgcgctaccccataaatccccagattgaccaacaaggccagggaatgaatcttcttgttcattgttttattcctgcatttttgccacgaattgcaactgtcgggcatggtcgtcatcaacacgacgcatcccgctaccgcgaaaacctttgatcctgaaagacacgcagtgcagttggttaattaatgtccgcgcttcccacggcgcgccattacgctattgcaaatgcaaatagttatcaataatattatcaatatatttctgcaatcaatgaaaaattgcacagtaaacatggggttatggtgtgacggcgttaaaagtaggaagtgagagctggtggcagtcgaaacatggcccggaatggcagcgtctgaatgacgaaatgtttgaggtcactttctggtggcgtgatccccaaggttctgaagaatacagcacgataaagcgcgtatgggtctacatcactggtgtgaccgatcaccatcagaacagccagccccagagcatgcagcgaattgcaggcactaacgtctggcagtggacgacacaactcaatgccaactggcgcggcagctactgctttattcccaccgaacgcgatgacattttttctgtaccatcccccgatcgcctcgaattgcgcgaaggctggcgaaaactattaccccaggcgatagccgatccgctgaacctacaaagctggaaaggcgggcgagggcacgctgtttctgcactcgaaatgccgcaagcgcctctgcaaccgggatgggattgtccgcaagcgccagaaatacctgccaaagaaattatctggaaaagtgaacggttgaaaaagagtcggcgtgtatggatttttaccaccggcgatgcaacagcagaagaacgcccgctggcagttttgctcgatggcgaattttgggcgcaaagtatgcccgtctggccagtgctgactagcctgacccatcgtcagcaacttcctcccgccgtgtatgtgttgatcgacgctatcgacaccacgcaccgcgcccacgaactgccgtgtaatgcggatttctggctcgcagtacagcaagagttattacccctggtgaaagctattgccccttttagcgatcgtgccgatcgcaccgtggttgccgggcagagttttggtgggctttccgcgctgtatgccggactgcactggcctgaacgctttggctgtgtattaagccagagtggaagctactggtggccgcatcggggcgggcagcaagagggcgtgttacttgaaaagctaaaagctggtgaagttagcgccgaaggtctgcgcattgtgctggaagcgggtattcgcgagccgatgatcatgcgggccaatcaggcgctgtatgcgcaattacaccccataaaagaatccattttctggcgtcaggttgacggcggacatgatgcgctttgttggcgcggtggcttgatgcaggggctaatcgacctctggcaaccacttttccatgacaggagttgaatatggcattcagtaatcccttcgatgatccgcagggagcgttttacatattgcgcaatgcgcaggggcaattcagtctgtggccgcaacaatgcgtcttaccggcaggctgggacattgtgtgtcagccgcagagtcaggcgtcctgccagcagtggctggaagcccactggcgtactctgacaccgacgaattttacccagttgcaggaggcacaatgagccagcatttacctttggtcgccgcacagcccggcatctggatggcagaaaaactgagtgaattaccctccgcctggagcgtggcgcattacgttgagttaaccggagaggttgatagcccattactggcccgcgcggtggttgccggactagcgcaagcagatacgctgcggatgcgttttacggaagataacggcgaagtctggcagtgggtcgatgatgcgctgacgttcgaactgccagaaattatcgacctacgaaccaacattgatccgcacggtactgcgcaggcattaatgcaggcggatttgcaacaagatctgcgcgtcgatagcggtaaaccactggtctttcatcagctgatacaggtggcggataaccgctggtactggtatcagcgttatcaccatttgctggtcgatggctttagtttcccggccattacccgccagatcgccaatatttactgcacatggctgcgtggcgaaccaacgcctgctagcccatttacgcctttcgctgatgtagtggaagagtaccagcaataccgcgaaagcgaagcctggcagcgtgatgcggcattctgggcagaacagcgtcgtcaactgccgccgcccgcgagtctttctccggcacctttaccggggcgcagcgccagcgcagatattctgcgcctgaaactggaatttaccgacggggaattccgccagctggctacgcaacttagtggtgtgcagcgtaccgatttagcccttgcgctggcagccttgtggctggggcgattgtgcaatcgtatggactacgccgccggatttatctttatgcgtcgactgggcagcgcggcgctgacggctaccggacccgtgctcaacgttttgccgttgggtattcacattgcggcgcaagaaacgctgccggaactggcaacccgactggcagcacaactgaaaaaaatgcgtcgtcatcaacgttacgatgccgaacaaattgtccgtgacagcgggcgagcggcaggtgatgaaccgctgtttggtccggtactcaatatcaaggtatttgattaccaactggatattcctgatgttcaggcgcaaacccataccctggcaaccggtccggttaatgaccttgaactggccctgttcccggatgtacacggtgatttgagtattgagatcctcgccaataaacagcgttacgatgagccaacgttaatccagcatgctgaacgcctgaaaatgctgattgcccagttcgccgcggatccggcgctgttgtgcggcgatgtcgatattatgctgccaggtgagtatgcgcagctggcgcagctcaacgccactcaggttgagattccagaaaccacgcttagcgcgctggtggcagaacaagcggcaaaaacaccggatgctccggcgctggcagatgcgcgttacctgttcagctatcgggaaatgcgcgagcaggtggtggcgctggcgaatctgctgcgtgagcgcggcgttaaaccaggggacagcgtggcggtggcactaccgcgcagcgtctttttgaccctggcactccatgcgatagttgaagctggagcggcctggctaccgctggataccggctatccggacgatcgcctgaaaatgatgctggaagatgcgcgtccgagcctgttaattaccaccgacgatcaactgccgcgctttagcgatgttcccaatttaacaagcctttgctataacgccccgcttacaccgcagggcagtgcgccgctgcaacttagtcaaccgcatcacacggcttatatcatctttacctctggctccaccggcaggccgaaaggggtaatggtcgggcagacggctatcgtcaaccgcctgctttggatgcaaaatcattatccgcttacaggcgaagatgtcgttgcccaaaaaacgccgtgcagttttgatgtcagcgtgtgggagtttttctggccgtttatcgcaggggcaaaactggtgatggctgaaccggaagcgcaccgcgacccgctcgctatgcagcaattctttgccgaatatggcgtaacgaccacgcactttgtgccgagcatgctggcggcatttgttgccagcctgacgccgcaaaccgctcgccagagttgcgcgacgttgaaacaggttttctgtagtggtgaggccttaccggctgatttatgccgcgaatggcaacagttaactggcgcgccgttgcataatctatatggcccgacggaagcggcggtagatgtcagctggtatccggcttttggcgaggaactggcacaggtgcgcggcagcagtgtgccgattggttatccggtatggaatacgggtctgcgtattcttgatgcgatgatgcatccggtgccgccgggtgtggcgggtgatctctatctcactggcattcaactggcgcagggctatctcggacgccccgatctgaccgccagccgctttattgccgatccttttgccccaggtgaacggatgtaccgtaccggagacgttgcccgctggctggataacggcgcggtggagtacctcgggcgcagtgatgatcagctaaaaattcgcgggcagcgtatcgaactgggcgaaatcgatcgcgtgatgcaggcgctgccggatgtcgaacaagccgttacccacgcctgtgtgattaaccaggcggctgccaccggtggtgatgcgcgtcaattggtgggctatctggtgagccaaagcggcctgccgttggataccagcgcattgcaggcgcagcttcgtgaaacattgccaccacatatggtaccggtggttctgctgcaacttccacagttaccacttagcgccaacggcaagctggatcgcaaagccttaccgttgcctgaactgaaggcacaagcgccagggcgtgcgccgaaagcgggcagtgaaacgattatcgccgcggcattcagcagcttgctggggtgtgacgtgcaggatgccgatgctgatttcttcgcgcttggcggtcatagcctactggcaatgaaactggcagcgcagttaagtcggcaggttgcccgccaggtgacgccggggcaagtgatggtcgcgagtactgtcgccaaactggcaacgattattgatgctgaagaagacagcacccggcgtatgggattcgaaaccattctgccgttgcgtgaaggtaatggcccgacgctgttttgtttccatcctgcgtccggttttgcctggcagttcagcgtgctcagccgttatctcgatccacaatggagcattatcggcattcagagtccgcgccccaatggccccatgcagacggcggcaaacctggatgaagtctgcgaagcgcatctggcaacgttacttgaacaacaaccgcatggcccttattacctgctggggtattcccttggcggtacgctggcgcagggtattgcggcgcgactgcgtgcccgtggcgaacaggtggcatttcttggcttgctggatacctggccgccagaaacgcaaaactggcaggaaaaagaagctaatggtctggacccggaagtgctggcggagattaaccgcgaacgcgaggccttcctggcagcacagcagggaagtactagtacggagttgtttaccaccattgaaggcaactacgctgatgctgtgcgcctgctgacgactgctcatagcgtaccgtttgacggtaaagcgacgctgtttgttgctgaacgcacacttcaggaaggtatgagtcccgaacgcgcctggagcccgtggatagcggagctggatatctatcgtcaggattgtgcgcatgtggatattatctctccagggacgtttgaaaaaattgggccgattattcgcgcaacgctaaacaggtaaattaatattatttataaacccataattacagaaaataattatgggttttttatttgtttgatttataggtttgatgaatatttctcttaaatagagtgaatgttgcattcagtggaaggaatttacaaacttcagcttcggataattatcaccaactggtaaagtgagcgccgtggagatttccccctattggactcattttcaggttataccccatgagtagtctgaatattaaacagggaagtgacgctcattttcccgattatcctctggcgagccccagtaataatgaaattgatttacttaatctaatcagtgttttatggcgggccaaaaaaacggtcatggcggtcgtttttgcgtttgcctgcgcaggcttgctgatctctttcatcctgccgcaaaaatggaccagcgcggcggttgtcacgcctccagaacctgttcagtggcaagagttggagaaaagtttcactaagcttcgtgtgctggatctggatatcaaaattgatcgtacagaagcatttaacctgtttatcaagaagtttcagagcgttagcttgctggaagagtacctgcgtagtagtccttatgtgatggaccaattaaaagaggcgaaaatcgacgaactggatttgcatcgcgcaattgtcgcattgagcgaaaaaatgaaagcggttgatgacaatgccagtaagaaaaaagatgaaccgagtctgtatacctcctggacgctaagttttaccgcgccaaccagtgaagaggcgcagaccgttttgagcgggtatatcgattatatctctacgttggtggtgaaagagagcctagaaaacgtccgtaataaactggagatcaaaacccagtttgaaaaagaaaaactggctcaggatcgcattaaaacgaaaaatcaacttgatgcaaacattcagcgcctcaattatagtctcgacattgccaacgcggcaggaattaaaaagcccgtttacagtaatggtcaggccgttaaagatgaccccgatttttctatttctctcggtgcagacggtattgaacgcaaactggaaatagaaaaagcggtcactgacgttgcggaactgaacggtgaattacgtaatcggcagtatcttgtcgagcaattaacaaaagcacatgtcaacgatgtgaattttacgccgtttaaatatcagttaagcccgagtttgccagtgaaaaaagacggtccgggtaaggcgattattgtgatcctttccgcgttgatcggcgggatggtggcttgtggtggcgtgctgttgcgctatgcgatggcatccagaaaacaggatgccatgatggcagaccacttagtttaactatttgcggtactaggtgccgttcgtccgagcggcaccacaagcggcgttccggcaactggatcgtcaatgatcatgcagcgcagaccataaatgcgctcaatcagttcagcagtgacaatctccttcggcgctccctgagcaacaattttcccttcccgcaatgcaatcaaatggctggcgtaacgacaggcctgattaagatcgtgcagcaccgccgccagggtatagcctttttcgcggttcagttcgcttaacaactccagcaaatcaatctgatgactgatatccagccaggtcgtgggttcgtcgagcagcataattgccgtttcctgggccagcaccatcgcgatccacgctcgctggcgttgtccgccagaaagggtatccacgctttgatctgccagatgagttattcccgtggcctgcattgctttcgttaccgcttcttcatcctctttgcgccagcgggtaaacagcggttgatgcggataacgtccacgcgccaccagctcctgcacggtgatatcgcccggcgtggtagcattttgcgccaacagaccaatccggcgtgcaacctctttactggcgtaatgttgaatgtgctcgccatccagccagacatgcccatgagcaggcgtcatcaggcggcttaaggtacgcagtaacgtggatttaccgcagccatttggcccgataattgccgtgaagtgaccatcaggtatttctacagtcagattttccgcaacggtatatttgccatatcccagggttaactgttcgccgcgcaaacgggctacactttcggtcattttttgcgagactcctgaattaacaagacgataaggtaaataccgccgaggctgacggtaacgacgccaaccggaagttgatacggcataaacagttgttgggcgcagagatcggccgccagcagtaacagcgccccgcatagcgccgcctgggttagcccccagcgagcggtgccgctaatgcgtcgggcaatgtgcggtgcgactaaagcaataaaggaaatcggcccggcaagcgctgttgccgcagcggtaagcaccactgcaaccagcatcattaacagacggctacgttcgacgctgacgcccagcgcacacgcggtatcatcgcccatttccagcaagcgcatccggcgtaccagtaaggcggcggcaatgagcatcaatataatgatgggtgcggaagggctggtttttgcccacgtcaggccgttgaggcttccggcattccacaaacctgctgttagcgccgtttctaaagacgctttcagcaacagccaggtattaaaggccaccagcatggcgcgaacgccgataccgataataatcaaccgaaaggtgtcgatgccgttgcgccaggcgagcagccagaccagcaggctagtgacaatgccgcccaccattgcactcagcgcgatagccgtcaggtcctgaccaaacagcaccatcgccaccagcacgccgctccacgccccggtgttaaagcccattacgtcagggctgccgagcgggttacgcatcaggctctgaaaaatcgcgccactgacgcccagtgctgcgccaatcaacagcgccatcagcacgcgtggtaaacgccattcggtgaccaccatcgtcatactgcgcggcgcatcgcccatcagcgcggcgaatacctggctggtttccagcgtgacggcaccgctgcgtaatccccagatacctgcaaccacacaggcggaaaccagcagcaaacaggtgatgagtaatcggcgagagacgtaaatcatgcaccacctcgcgttttacgtcgcacgaggaagatcagcaccggtgcaccaataaacgcactgaccacagaaacgcgcagttcgccgggcacaatcacccgcccgatgatatcggcaaacagcagcagggcaggggtagcaagtagcgtgacgggcaggctccagcgatgatcggcacccaccagccaacgcgccatatgcggcatcatcaggccaataaaggcaatcgggccaactattgccgtcgcactaccacaaagcacggtaatcgccagcagaccaatcaactgtgtgcgcgccacgcgactgcccagcgccgtcgcggtgtcgctgccgaggctcaaactgttcagcgcgcgactcagtaatagcgcagttgctccggcgatcagcaccgggatcagcaccacttttaaggtatgtagattgcgaatatccaggctaccggcttgccagaaacgcaactgatcgtagacgtcaggattaagcagggcgatgccgctggtcagtccttccagcaccgccgccagcgccacgcccgccagggttaaacgcaccggacttaactgcccgccgccctgactgccggtaaaggcaacaatcaaactggccaccagcgccccggcgaaggccatcgccagttgttcctgcgcggaagagtaaccaaacagcgccgcacccagcacaatggcaaagctggctccggcgttcacgccaagcaagccggggtcggcaagtgggtttcgggtgagggtttgcattaacgccccggcaaggccaagcgcgccgcctgccagtaaaccggcaagggtacgcggcagccgcgcgtcgagcacgatggtgcagtcggcgctctggcaggtgccggagaaggcctccagcactacggaagcggggagactttttgccccaatgagcaggcttaatgccgtcgcgataatcagtaataacagcaatccgggcacggcaatggcgcgtgtcacggcaacagaaccagacatacgaacttccatgataatgaaattaattatcgttatcgatcttatttggatatgttagcatgtgcagcctaagaataggtatttaaaatatttgatggcaaggcattgtaatgaataaacaatcctggctgcttaacctcagcctgttgaaaacgcacccggcgtttcgcgcagtattcctcgctcgtttcatcagtattgtgtctctgggtttgctcggcgtcgcggtgccggtgcagatccagatgatgacacattccacctggcaggtggggcttagcgtgacgctgaccggcggcgcgatgtttgttggcctgatggtcggcggtgtgctggcggatcgctatgagcgcaaaaaagtgattttgctggcgcgcggcacctgtggcattggcttcattggactgtgccttaatgcactgctgccggagccgagtttgctggcaatctatttacttggtttatgggatggttttttcgcaagccttggcgttacggcgctattggcggcgacaccagcactggtagggcgtgaaaacttaatgcaggccggggcgatcaccatgttgaccgtgcgtctggggagcgtgattagccccatgattggcggtttattgctggcgaccggtggcgtagcctggaactacgggctggcggcggcgggcacgtttattaccttgctaccgttgttaagccttccggcgttgccaccgccaccgcagccgcgtgagcatccgttgaaaagtttactggcaggatttcgttttctgcttgccagcccgctggtgggcgggattgcgctgctgggtggtttattgacgatggcgagcgcggtgcgggtactgtatccggcgctggctgacaactggcagatgagtgcggcacagattggttttctctacgcggcgatcccgctcggcgcggctattggtgcgttaaccagcgggaagctggcacatagtgcgcgaccagggttattgatgctgctctccacgctgggaagcttcctcgccattggtctgtttggcctgatgccgatgtggattttaggcgtggtttgtctggcgctgttcggctggttgagtgcggtcagcagcttgctgcaatacacaatgctgcaaacgcaaaccccggaagcgatgttagggcggattaacggtttgtggacggcgcagaacgtgacgggcgatgccataggcgcggcgctgctgggtggtttgggcgcgatgatgacaccggttgcttccgcaagcgcgagcggttttggtttgttgattatcggcgtgttgttattgctggtgctggtggagttgcgacattttcgccagacgccgccgcaggtgacagcgtccgacagttaatgcttaaaacagcgccttaagcctatccagcacttgcatggcgctgtagtaatccagacggaacgtctcggttcccagcgcataaacctgcttgttttgtactgcaggcaggtgcgcgagcagcggattagcataaatagcatcggcatctttctgatcaccggcgaacaggaatagactctcgccatttaaccctgcagccagattttccccaccaagctgaatgatgtcatggcgtttaccctgactttggctggcatttaaccctgcgggtaacttcgccagcgtaaagccgagttgttccagcatctgcccttgtgcactttctggcgtccagagattggcactgtgtgcagcggcagtatagacaatggcagtgaccggctgcggcggtaatttgatttgctctttcgccgccgccagttgcttatcaaactgcgcaatccgctctgccgcttgtttctcatgcccggtaatttcgccaagttgcgttaacaggctctgccagcttttgtcgtcgtaattgatgattaatgtcggggcgatggtggaaagctgatcatacagtgccagcgcgctatccccgccggttgcgctaattaaaatcagatccggcatttgcgcggcaacggcttcggcgctcggttcgccgatatagagccgttgcagtttgcgttctttcgccaccttgctccactggcgtaaaaagccctggtcatccgcgacgcggttattcggcgtggtcgcgccgctggcgatcaccggagcatcaatcgccagcagactgccggtcagggtgacgctggtggaaacaatacgctgcggctggctttccagtgtatgtgtgccacggctgtcagtaatctgacgcggccagtcagcggcctgaactgcggctattccactaagcaaaagtcctgttaatagaagggcgttgcggtagagcggggcgagtctcacaaatcagcttcctgttattaataaggttaagggcgtaatgacaaattcgacaaagcgcacaatccgtcccctcgcccctttggggagagggttagggtgaggggaacagccagcactggtgcgaacattaaccctcaccccagccctcaccctggaagggagagggggcagaacggcgcaggacatcacattgcgcttatgcgaatccatcaataatgcttctcattttcattgtaaccacaaccagatgcaaccccgagttgcagattgcgttacctcaagagttgacatagtgcgcgtttgcttttaggttagcgaccgaaaatataaatgataatcattattaaagcctttatcattttgtggaggatgatatggatacgagtctggctgaggaagtacagcagaccatggcaacacttgcgcccaatcgctttttctttatgagcccgtaccgcagttttacgacgagtggatgtttcgcccgcttcgatgaaccggctgtgaacggggatagccccgacagtcccttccagcaaaaactcgccgcgctgtttgccgatgccaaagcgcagggcatcaaaaatccggtgatggtcggggcgattcccttcgatccacgtcagcctagcagcctgtatattcctgaatcctggcagagcttctcccgtcaggaaaaacaagcttccgcacgccgtttcacccgcagccagagcctgaatgtggtggaacgccaggcaattccggagcaaaccacgtttgaacagatggttgcccgcgccgccgcacttaccgccacgccgcaggtcgacaaagtggtgttgagtcggttgattgatatcaccactgacgccgccattgatagtggcgtattgctggaacggttgattgcgcaaaacccggttagttacaacttccatgttccgctggctgatggtggcgtcctgctgggggccagcccggaactgctgctacgtaaagacggcgagcgttttagctccattccgttagccggttccgcgcgtcgtcagccggatgaagtgctcgatcgcgaagcaggtaatcgtctgctggcgagtgaaaaagatcgccatgaacatgaactggtgactcaggcgatgaaagaggtactgcgcgaacgcagtagtgagttacacgttccttcttctccacagctgatcaccacgccgacgctgtggcatctcgcaactccctttgaaggtaaagcgaatagccaagaaaacgcactgactctggcctgtctgctgcatccgacccccgcgctgagcggtttcccgcatcaggccgcgacccaggttattgctgaactggaaccgttcgaccgcgaactgtttggcggcattgtgggttggtgtgacagcgaaggtaacggcgaatgggtggtgaccatccgctgcgcgaagctgcgggaaaatcaggtgcgtctgtttgccggagcggggattgtgcctgcgagcagtccgttgggtgagtggcgcgaaacaggcgtcaaactttctaccatgttgaacgtttttggattgcattaaggagcgaggatgagcattccattcacccgctggccggaagagtttgcccgtcgctatcgggaaaaaggctactggcaggatttgccgctgaccgacattctgacgcgacatgctgcgagtgacagcatcgcggttatcgacggcgagcgacagttgagttatcgggagctgaatcaggcggcggataacctcgcgtgtagtttacgccgtcagggcattaaacctggtgaaaccgcgctggtacaactgggtaacgtcgctgaattgtatattacctttttcgcgctgctgaaactgggcgttgcgccggtgctggcgttgttcagccatcagcgtagtgaactgaacgcctatgccagccagattgaacccgcattgctgattgccgatcgccaacatgcgctgtttagcggggatgatttcctcaatactttcgtcacagaacattcctccattcgcgtggtgcaactgctcaacgacagcggtgagcataacttgcaggatgcgattaaccatccggctgaggattttactgccacgccaagtcctgctgatgaagtggcctatttccagctttccggtggcaccaccggcacaccgaaactgatcccgcgcactcataacgactactactacagcgtgcgtcgtagcgtcgagatttgtcagttcacacaacagacacgctacctgtgcgcgatcccggcggctcataactacgccatgagtagcccaggaagcctgggcgtctttcttgccggaggaacggttgttctggcggccgatcccagcgccacgctctgtttcccattgattgaaaaacatcaggttaacgttaccgcgctggtgccacccgcagtcagcctgtggttgcaggcgctgatcgaaggcgaaagccgggcgcagcttgccagcctgaaactgttacaggtcggcggcgcacgtctttctgccacccttgcggcgcgtattcccgctgagattggctgtcagttgcagcaggtgtttggcatggcggaagggctggtgaactacacccgacttgatgatagcgcggagaaaattatccatacccagggttacccaatgtgtccggatgacgaagtatgggttgccgatgccgaaggaaatccactgccgcaaggggaagtcggacgcctgatgacgcgcgggccgtacaccttccgcggctattacaaaagtccacagcacaatgccagcgcctttgatgccaacggtttttactgttccggcgatctgatctctattgatccagagggttacatcaccgtgcaggggcgcgagaaagatcagattaaccgtggcggcgagaagatcgctgccgaagagatcgaaaacctgctgctgcgccacccggcggtgatctacgccgcactggtgagcatggaagatgagctgatgggcgaaaaaagctgcgcttatctggtggtaaaagagccgctgcgcgcggtgcaggtgcgtcgtttcctgcgtgaacagggtattgccgaatttaaattaccggatcgcgtggagtgtgtggatagtcttccgctgacggcggtcgggaaagtcgataaaaaacaattacgtcagtggctggcgagtcgcgcaagtgcctgaaggagagaacacgatggctattccaaaattacaggcttacgcactgccggagtctcacgatattccgcagaataaagttgactgggcctttgaaccgcaacgtgccgcgttgttaatccatgatatgcaggactattttgtcagcttctggggcgagaactgcccgatgatggagcaggtgatcgcgaatattgctgcgctgcgcgactactgcaaacagcacaatatcccggtttattacaccgcccagccgaaagagcagagcgatgaagatcgggcgctgttgaatgatatgtgggggccgggcctgacccgcagcccggaacagcaaaaggtggtggatcgcctgacgccagatgccgacgacacggtgctggtgaagtggcgctacagcgcgtttcatcgttctccgctggagcaaatgctgaaagagagtggacgtaaccagctgattattaccggggtatatgcccacattggctgtatgaccaccgcaaccgacgcatttatgcgcgatattaaaccgtttatggtggcggatgcgctggccgatttcagccgtgacgagcatttgatgagcctgaaatatgtggccggacgttctggccgggtggtgatgactgaagaattactgccagcacctatccccgccagcaaagcggcgctgcgtgaggtgatcctgccgttgctggacgagtccgatgaaccgttcgatgacgacaacctgatcgactacggtctggatagcgtgcgcatgatggcgctggcggcgcgctggcgcaaagtgcatggtgatatcgactttgtcatgctggcgaaaaacccgaccatcgacgcctggtggaagctactctcccgcgaggtgaaataatggatttcagcggtaaaaatgtctgggtaaccggcgcaggtaaaggtatcggctacgccacggcgctggcgtttgttgaggcgggagcgaaagttacaggttttgatcaagcgttcactcaggagcaatatccctttgcgaccgaagtgatggatgttgccgacgctgcgcaggtcgcgcaagtgtgtcagcgactgttagctgaaacggagcgactggacgcgctggtcaatgcggcgggaattttacgcatgggcgcgaccgatcagctcagtaaagaggactggcagcagacttttgcggttaacgtcggcggtgcgtttaacctgttccagcaaaccatgaaccagtttcgccgtcagcggggcggggcgattgtcactgtggcgtccgacgccgcgcacacgccgcgtattggcatgagtgcttatggcgcaagcaaagcggcgctgaaaagcctggcgttgagcgtcgggctggaactggcgggtagcggcgtgcgctgtaatgtggttagccctggctccaccgacaccgatatgcaacgcacgctgtgggtgagcgatgacgccgaagaacagcgtattcgcggctttggcgagcagtttaaactcggcattccgctggggaaaatcgcccgtccacaagagatcgccaacacgattttgttcctcgcctctgacctcgccagccatattaccctacaggatattgtggtcgatggcggcagtacgctgggggcataagcatgatctggaaacgccatttaacgctcgacgaactgaacgccaccagcgataacacaatggtggcgcatctgggaattgtgtatacccgtctgggcgatgatgtgctggaagccgaaatgccggttgatacccgtactcatcagccgttcggtttactacatggcggcgcgagcgcggcgctggcggaaacgctgggaagcatggccggatttatgatgacccgcgacggacagtgtgtggtaggcacagaacttaatgcaacacaccatcgcccggtgtctgagggaaaggtacgcggcgtctgccagccgctgcatcttggtcggcaaaatcagagctgggaaatcgtcgttttcgatgaacaggggcggcgttgctgcacttgtcggctgggtacggcagttttgggatgaacccgacagaattagatgagattgcaggaaaactcggttaacggagtgatcgagttaacattgttaagttaaatattggtttcaactccgatttacatggttgctgtgttgttaaattgtacaaagatgttatagaaacaaaatgtaacatctctatggacacgcacacggataacaactatgaacaaaagtgggaaatacctcgtctggacagtgctctctgtaatgggagcatttgctctgggatacattgctttaaatcgtggggaacagatcaacgcgctgtggattgtggtggcgagcgtctgtatctatctgatcgcttaccgtttttatgggctgtatatcgccaaaaatgtgctggcggttgacccgacgcgtatgacgccagcggtgcgccataacgacgggctggactatgtgccgacggacaagaaagtgctgttcggtcaccattttgcggccattgccggagcaggtccgctggtggggccggtactggcggcgcaaatgggctacctgccggggatgatctggctgctcgctggggtggttctcgccggtgcggtgcaggatttcatggtgctgtttgtttctacgcgccgtgacggtcgcagcctgggtgagctggtcaaagaagagatggggccaaccgccggggtgattgcgctggtggcctgctttatgatcatggtcattatccttgcagtgctggcgatgatcgtggtgaaagccctgactcatagcccgtggggaacatataccgttgcgttcaccattccgctggcgctgtttatggggatctacctgcgctatctgcgtccggggcgtattggcgaagtgagcgtcatcggtctggtattcctgattttcgccattatctctggcggctgggtggcagaaagtccgacctgggcaccgtactttgactttaccggcgtgcagttgacctggatgctggtgggttacggttttgtggcggcggtgctgccggtgtggttactgctggccccgcgtgactacctctctaccttcctgaaaatcgggactatcgtcggtctggcggtaggcattttgattatgcgcccgacgctgaccatgcctgcgctgaccaaatttgtcgatggcactggcccggtatggaccggtaacctgttcccgttcctgtttatcaccatcgcctgtggcgcggtgtctggcttccatgcgctgatctcttctgggaccacgccgaagatgctggcgaacgaagggcaggcgtgctttatcggctacggtgggatgttaatggaatccttcgtggcgattatggcgctggtttccgcctgtatcatcgatccgggcgtgtattttgccatgaacagcccgatggcggtgctggctccggcagggacggcggatgtggtcgcttctgccgcgcaggtggtgagtagctggggctttagcattacaccagatacgctaaaccagattgccagcgaagtgggtgaacagagcatcatttcccgtgcgggcggtgcgccgacgctggcggtggggatggcctacattctgcacggcgcgctgggcggcatgatggatgtggcgttctggtatcacttcgccattttgtttgaagcactgtttattctgacggcggtggatgcaggtacgcgtgctgcgcgctttatgttgcaggatctgctgggcgtggtgtctcctggcctgaagcggaccgatagtctgcctgctaacctgctggcaacagcgctgtgcgtactggcgtggggctacttcctccatcagggcgtggtcgatccgctgggcggcattaacactctgtggccgctgtttggtattgccaaccagatgctggcagggatggcgctgatgctctgtgccgtggtgttgttcaagatgaaacgtcaacgttacgcctgggtggcgctggtaccaacggcctggctgctgatttgtaccctgaccgcaggctggcagaaagcgtttagcccggatgcgaaagtcggcttcctggccattgctaataagttccaggcaatgatcgacagcggcaatattccgagccagtatactgagagtcagctggcgcaactggtgttcaacaaccgtctggatgccgggttaaccatcttctttatggtggtcgtggtggttctggcactgttcagcattaagacggcacttgcggcattgaaagatccgaagccaacggcgaaagaaacgccgtatgaaccaatgccggaaaatgtcgaggagatcgtggcgcaggcaaaaggcgcacactaaagtcagagtgagggggggatgttggcgaatgttggcttagtgcccagggttccctctcaccctaaccctctccccggtggggcgaggggactgaccgagcgcgttgatagcatttgtaggccggataaggcgttcacgccgcatccggcactctttcagcaacatggttagcggaggccaagatgtttgatagtctggcaaaagccggaaaatatttaggtcaggcggcgaagctgatgattggtatgcctgattacgacaactatgtcgaacatatgcgggttaaccatcccgatcaaacgccgatgacctacgaagagtttttccgtgagcggcaggacgcgcgctacggtggaaaaggcggcgcgcgctgctgctaaatttgtacgtcaggctttaaagctttccacttttttgaacgctgcacgcaacgtatctggtgtcagcgtgactggcaggtaatgaatggactccaccggacgcagggtgtgggcaatcactttgtcgatctccgcctgattattgatatccacttccagctccgccagtgtagtcggcagatgaaaacgctgatacgctccagttaattgcgccagcacatcatcctgacccagcaaggcgctttgcaccagaattccgtaggcgactttggtgccgtggagaaacttctcggtttgcggcagcacggtcagaccgttatgcacggcatgagctgccgccacacgcgtaaaacgatcgcccagaccaccaaccatcccaccaccagcaataatagcatccaccacatcgcaaaaactttgcgttaactgttgattttgctgatcgctcagcgcctgttcgctactgtttaacaagacgtcgcgaatggcttgcgcattattgatccccagtcgcacggttagcggcaacgtttctggttgcggagccagcaccaccgcttcataccatttcgccagcgtgtcaccgatccccgccagcagatattgttgcggtgcattgaggataatctccggttccaccagcaccataaaattggcgtcgtcgaaaatctcataatgcagcgcctgtccggcatcattataccagacggagagcggtgtccaggcggcgcaggtggcggcgatcgtcggaacggcaacaaacggcagaccgagacggcgggcgagggctttcgcggtgtcgagcagtgcaccgccaccgacgccaatcaccacgctgcggtcgtcaccggactcagccgccagttgttgtacatcgctttcgctgcaatgaccgcgaaacaaaatatgctttgcccctggcagtccaaacgctggcggaagtttggtttgcgccgcagcaatggcgcgtttgccgtagatccacaccgcgcgagaaagttgttcatcagtgaaaaaatcgtgcaggtgattgaaacttcctggatgactaaagtagttagccgggccgacgaccacgcggataggattgtgaggcatgttgtgttgtccttattgttttatttagacatctaaacgtcttgattgccaaatactagcatcgtgttatagtgccttcaacacgcaacttcgtcaggtacaataaaaatgacaaataaccctctgattccacaaagcaaacttccacaacttggcaccactattttcacccagatgagcgcgctggcgcagcaacaccaggcgattaacctgagccaaggctttcctgattttgatggtccgcgctatttacaggagcggctggcgcaccacgttgcacagggggcaaaccaatacgcgcccatgaccggcgtgcaggccttgcgcgaggcgattgctcagaaaacggaacgtttgtatggctatcaaccagatgccgatagcgatatcaccgtaacggcaggggcgacggaagcgttatacgcggcgattaccgcactggtgcgcaatggcgatgaagtgatttgttttgatcccagctatgacagttacgcccccgccatcgcgctttctgggggaatagtgaagcgtatggcactgcaaccaccgcattttcgcgttgactggcaggaatttgccgcattattaagcgagcgcaccagactggtgatcctcaacactccgcataaccccagtgcaactgtctggcagcaggctgatttcgccgctttgtggcaggcgatcgccgggcacgagatttttgtcattagcgatgaagtctacgagcacatcaactttagtcaacagggccatgccagtgtgctggcgcatccgcagctgcgtgagcgggcagtggcggtttctagttttggcaagacctatcatatgaccggctggaaagtgggttattgtgttgcgccagcgcccatcagcgccgaaattcgcaaggtacatcagtatctgacctttagcgtgaataccccggcacagctggcgcttgctgatatgctacgtgcagaacctgagcattatcttgcgttaccggacttttatcgccagaagcgcgatattctggtgaatgctttaaatgaaagccggctggagattttaccgtgtgaaggtacatactttttgctggtggattacagcgcggtttctaccctggatgatgttgagttttgccagtggctgacgcaggagcacggcgtagcggcgattccgctgagcgtgttttgcgccgatcccttcccacataaactgattcgtctctgttttgccaagaaggaaagcacgttgctggcagcagctgaacgcctgcgccagctttaattatttaaccgtccaggcgcgggaatattgacggtcggcaaacaactcttgcaggccgttaatttgcttcaggcgcagcacttcgtcgctgtccattcccagctctttgccaattttattatcgtcccatcccaactggctaagttcacggacgatttcgctcatggcggtgatttgatggcgtccacgagcgcgattatgacgaatagtcgcggcgatgcgttgattacgcgtaccttccagacaggtcaccggcaaataaccttttaagcgtaattttaaactactactgcctttaccaatttcatggcggtgaaaaccatccacgatttccatggcatttttatccgtatgtgtgaccacaatgggttgggtaaaaccatctatttcaatggatttttgcagcagttttttttcgggtggtgccacgttgtttgggttgtaatcattaggcataagttggctgtttttaacccacagaacgcaatccactggctcttcacgaaaggggctaacctgatggatcgccatgcggatttcattaatcgctttgatgcgatcatcttccggcaagctggcgagaaattgcgttaaatcctgcgttaatcgttgttgcatagtatcccccattcctgacgttttccttttatccgttcgttataacgctgatagttcttgctttttgtggggctaaaacttaatgcccgacaccagtaatcgttattgagtaaaactttgcatatccgccgccaggaggggatatctttcgcgccaatgtccccttgctgggtttgtggaacctcgatgccttttttctgataccagtgcaaataaatggcgattttattgcggtaatgctcagctgttttttccggcatgctattgagcagcaataatgcatattcttgccagtctaaatgttctggcttgaggattttccgatgcccatagaaatgattgtcatgtccggcgtaaatgccgccactttttaccccgctgactcgtgcgcacatagcagcccagcgatccggttcgataacgtgatagagccataatccttgtcgttgctccgggccaaaaggttcgcaaattcgcatatgacgcagaggaacgcctgcctgatacattaggttatacagtgggttgcagagactttgatgatttgcataccaggtccagatatcagccactttccagtcgtaaatggggtaaatgtaccagctatgaccgcctggtgcggccgtagtccagggtttatcgtcggcaaaacgttgtttatttaaactggcgatggcgacaaaacggttgtaggactcatccgcacggatgccgatcatcatcgccgccggacgtttttgactaaaccattcggcaaactcacgtacaaattgttcgaaggtcatgcctggctggtaaaagcagaaaaagtcagggtcggttatcgcatcttggggaggttgacgtacccattcgacatcaggttcccagcactgccattcgggttggtattgactaagggaattttgcgtcgtaagcgggagcgcaacccagtaaaactcttcgatgacatcggtgtacaactcgcgcagggactgaacatagttaatggtgcaagagaattgcgcctcccagtcgataaacaaaacgcagatttttttgcccatttgtcgggcaagttcggctgtcagatgcagcattaaaccagagtctttgccgccagaaaaactgacacaaacgcggggtagggtgttgagtgtccaggtaatacgctctcgtgcagcttccagaatattgagcggaagaggaattttataaatagacatctgaagacgctctctgaacgttacagggtgatcagtgagataagtctgttaattataaagtaaacactgtaaagcagagtgttttatttttcattcgcgctgtgaataaatagatgaaagttatagtagctgtctgtagttatatatcaaaaactctcatttagacggtcaataaatcgggagaacaccaaattatttaaagaagatttattataggaaatgtaaagctttatactaggtaacggatgttctagttttatctcttttaagttaagaaagtcacggtaggaattataaagttcataggggactattcccagtaaatctgtaactgcaatgctattaatgattgtcagcaaagaggaaccacgaaaactgattttgcgattcataaatctctcgtctatttccatttgaatatcatcaacccctgcacttttagatattaattgggtgaactcttctgccataatttgttcataagtgctattgtcagtaattcgtggatgcctattactacaaattagagtattgcgaatcgtatgcaatggcatgcaaatgacggaacggctgatcactggcatttgggtgatcaccagatcggctttgcggtgaaccaacagttcttcagcattctctgcactcatgaggatatcatggcactcaatctcgacagaggaatcttgccgtaggcagcggatcagcatactattattagagcaagaaatgagctgagggccgtagataataaagtttttctttagttcggacttattgactatattaattgtttgttcaaggcctctgagatttttctcaagatggtgatgcagatttaaccctgttgtcgtcggcgcgataccttttccactgcgaatgaataaagggtcattaaattgcgcacgtaagcgttgtaagctctggctcacggcacttggggtgatatatagactttcagcagctttgctaatgcttaaatgctggtaaatacactcaaatatgacaagaagatttaagtcgaactttttcaagtcgtagagattggccatacactactccggttatatttttcttccatgatatattcacttaatcaatgttttttgcgtatatatttttattgattatgtttttttgcttaactcaggattaagtttttctaaaatagcacagccacttagggcagagcgagcaattcatgcttttttaggatggttgaaaagcagggatatagttcaaccatccatgaattaccttttatttattccccataatgatattaagcgttttctgatcgggcaaccccacggcctgttgtagcgtattttccttactcatgtaatagatagccggcgtgacatttgcccccagatcgtccatcagtttctcattgtcacttaacactttcatttgctctgtacttacgtttgcaggcacgtttagcttaagcttgccaccagaggcttcatattgttgccaggtttttgcgggatctttggaggcaagaattgccgctgctgtcgccgggctttctggcttgataaccccaaccaacaatgttcttaattgcactttgccagaatctacccacgggcgcgcctgctgccagaactgtttacaatatgggcagaacggatcggcgaagacgtagacaatgaccggcgcatcttttttaccgtcgaggagccagtgggattgttccatccgttgccacatttcgcgtccggctggtgcgtaaatttctttttcgataagtgtgttactcaggttttcacctttctcgttgtacatgtaaccagagatagcgtgcttaccatctggagtcaggtagatggtgacgcccatatcctgatactttccgagataacctttcattcctccgggggcatcgaatgttttgatgattgtaatgccctgtttttcaatcgcttttactggagcaggaagttcctctgcgaaggcgattgcaggaagcagagccagtaaaagtatcttttttaacattaatttgtccttttcagtcagtgcaaaagtcgagtaaaaggcataacctatcactgtcataggtaagagcttagatcaggtgattgccctttgtttatgagggtgttgtaatccatgtcgttgttgcatttgtaagggcaacacctcagcctgcaggcaggcactgaagataccaaagggtagttcagattacacggtcacctggaaagggggccattttactttttatcgccgctggcggtgcaaagttcacaaagttgtcttacgaaggttgtaaggtaaaacttatcgatttgataatggaaacgcattagccgaatcggcaaaaattggttaccttacatctcatcgaaaacacggaggaagtatagatgtccttgattaacaccaaaattaaaccttttaaaaaccaggcattcaaaaacggcgaattcatcgaaatcaccgaaaaagataccgaaggccgctggagcgtcttcttcttctacccggctgactttactttcgtatgcccgaccgaactgggtgacgttgctgaccactacgaagaactgcagaaactgggcgtagacgtatacgcagtatctaccgatactcacttcacccacaaagcatggcacagcagctctgaaaccatcgctaaaatcaaatatgcgatgatcggcgacccgactggcgccctgacccgtaacttcgacaacatgcgtgaagatgaaggtctggctgaccgtgcgaccttcgttgttgacccgcagggtatcatccaggcaatcgaagttaccgctgaaggcattggccgtgacgcgtctgacctgctgcgtaaaatcaaagcagcacagtacgtagcttctcacccaggtgaagtttgcccggctaaatggaaagaaggtgaagcaactctggctccgtctctggacctggttggtaaaatctaaatttccttcgtctttcacgccatagcggcgttggcgtcgcccgctcaccccggtcacttacttgtgtaagctcccggggattcacaggctagccgccttgctctgacgcgaaatacttcggaaattcacctaattcttcgggtgctgcggcacccgattttcttccccgcaccatgatgcaagctgcatccaggtagccgcagaggccgcttgcatgatgatgtttaaagcccaggagataaacatgctcgacacaaatatgaaaactcaactcaaggcttaccttgagaaattgaccaagcctgttgagttaattgccacgctggatgacagcgctaaaagcgcagaaatcaaggaactgttggctgaaatcgcagaactgagtgacaaagtcacctttaaagaagataacagcttgccggtgcgtaagccgtctttcctgatcaccaacccaggttccaaccaggggccacgttttgcaggctccccgctgggccacgagttcaccagcctggtactggcgttgctgtggaccggtggtcatccgagcaaagaagcgcagtctctgctggagcagattcgccatattgacggtgattttgaattcgaaacctattacagcctctcttgccacaactgcccggacgtggtgcaggcgctgaacctgatgagcgtactgaacccgcgcatcaagcacactgcaattgacggcggcaccttccagaacgaaatcaccgatcgcaacgtgatgggcgttccggcagtgttcgtaaacgggaaagagtttggtcagggccgcatgacgttgactgaaatcgttgccaaaattgatactggcgcggaaaaacgtgcggcagaagagctgaacaagcgtgatgcttatgacgtattaatcgtcggttccggcccggcgggtgcagcggcagcaatttactccgcacgtaaaggcatccgtaccggtctgatgggcgaacgttttggtggtcagatcctcgataccgttgatatcgaaaactacatttctgtaccgaagactgaagggcagaagctggcaggcgcactgaaagttcacgttgatgaatacgacgttgatgtgatcgacagccagagcgccagcaaactgatcccagcagcagttgaaggtggtctgcatcagattgaaacagcttctggcgcggtactgaaagcacgcagcattatcgtggcgaccggtgcaaaatggcgcaacatgaacgttccgggcgaagatcagtatcgcaccaaaggcgtgacctactgcccgcactgcgacggcccgctgtttaaaggtaaacgcgtagcggttatcggcggcggtaactccggcgtggaagcggcaattgacctggcgggtatcgttgagcacgtaacgctgctggaatttgcgccagaaatgaaagccgaccaggttctgcaggacaaactgcgcagcctgaaaaacgtcgacattattctgaatgcgcaaaccacggaagtgaaaggcgacggcagcaaagtcgttggtctggaatatcgagatcgtgtcagcggcgatattcacaacatcgaactggccggtattttcgtccagattggtctgctgccgaacaccaactggctcgaaggcgcagtcgaacgtaaccgcatgggcgagattatcattgatgcgaaatgcgaaaccaacgtgaaaggcgtgttcgcagcgggtgactgtacgacggttccgtacaagcagatcatcatcgccactggcgaaggtgccaaagcctctctgagtgcttttgactacctgattcgcaccaaaactgcataagaagaagtaagattcacctgcaattgcttagccgccggggtcaaacctggcggcttttttatggcattaaaaagccccgccgggatggctccgggcagggcgggatacttattctggcaattaacgcacaaccagcaccggcagattggcgtggcggatcacgctgctggcgttagaacctaacagatgggtgctaatgcttgggttgcgagaaccaataactacaacatcagcccccagttcttctgccaactcattgacttcatcccgcacgctaccaaaacggacatgttgtttaatgcgggaaggatcgatggtgaagtggctgaccatcgtttgcagacgttcttgtgcttcatgttgcagatgctcttcaaaacgacgcacatcagcggcaaaacggtgcaggctcaggctggcactcccgggtagtacgtgaagtagatgaataactccgtcatcctgggcgaggaattcagcgtggcgaacagctttgtcgctcaattccatttcaaatacatcaactggcataatgattgtcttatacataaccctttctccctgttaatcatgaacaaatcattcgccatgattataatatttatccctgatatttgtctggttctttttccttacgaactgtttctgtgatgaatatattctcactgaacaccaggaattctcccaaaacctgtggtaccgcccgttttcccgctgtgatagctacccttaaagactgactcttttttgaactgtctctggaggttgcatgaaagcattgacttatcacggcccacatcacgttcaggtagaaaatgttcccgatccgggcgttgaacaggcagatgatattattctgcgtattacggcaacggcgatctgtggctctgacctccatctttatcgaggcaaaatacctcaggttaaacatggcgatatttttggtcatgaatttatgggggaagtagttgaaaccggaaaggacgtaaaaaatttgcaaaaaggcgaccgagtggtaattccgttcgtcattgcttgtggcgactgttttttctgtcgattgcaacaatatgccgcctgcgaaaataccaatgcgggtaaaggcgctgcgctcaataaaaaacagataccagctccagcggcattgtttggttatagtcacctgtatggcggcgttcctggtgggcaggcggaatatgtccgcgtccctaaagggaatgtggggccgtttaaagtaccgcctttgcttagtgatgataaagcgcttttcctttctgatattctgccaacggcatggcaggcagcaaaaaatgcgcagatccaacaaggtagtagcgttgcagtctatggtgctggtcctgtgggattgttgacaatcgcctgtgcacggttgctcggtgcggaacagatttttgttgttgatcatcatccctaccgcttgcatttcgccgccgaccgctacggcgcgatcccgattaattttgatgaagacagcgatccggcacagagtattattgaacaaacggcaggtcaccggggcgtggatgcagtaatagacgccgtcggttttgaagcgaaaggcagcaccacggaaacggtgctgactaacctgaaactggagggcagcagcggtaaagcgttgcgtcagtgtattgcggcggtcaggcgtggcggcattgttagcgtaccgggcgtctacgctggatttattcacggtttcctgtttggcgacgcctttgataaagggttgagctttaaaatgggacagacccacgttcacgcatggctgggagaattattaccgttaattgagaaaggattactgaaaccagaagaaattgttacccactatatgccgtttgaagaggccgcccggggatatgagattttcgaaaaacgtgaagaggagtgccgtaaggtgattctggtacccggtgcacaaagcgcagaggcggcgcagaaggcggttagtggtctggtgaatgcgatgccggggggaacaatatgatcgtcaggagtggttttcgaggtaaaggacagccatgacgataatcgccgccataatcagaaatcctatcaggatgtaaaatgcttctgccatggttattcccacaaacgaaacggaataattttgcagcaaaagtgaacagtgagaaccaggaaaaattgctgattttgcgtaaagaggatgcgagtgcatcctctgggcaaagcgagttatcgcttgtgcagatgggattaaagcaggtagtcgccagcagcttctggctggtattcgagttccagcacttcaaggtgggttgcaacgccgcccggaagttcccagtgaatggaatcgccaacgcgcagccccagcagtgcggcacctaccggagccataacggaaagctgagtattgctatcggtcatttttgccggatacaccagcgtgcgcacacgcacttcgccatcgctaagattgcggaatttaacccggctgttcattgtcaccacgtcgtgtggcatctcttctgggctacacatttgggcgcgatccaactctgcgtttaacgcgtcggcgattggcaaaccagcataggcgggttgctccagcagaatatcgatgcgttcggcatccaggtcgttaatgatgatagttggtctggacatttttactccatgtcgtcggtgctgcgagtgtcgcagataaacatacccaaaagaaaaccctcaccgtcaggcggcgagggtttaactcacatgatgatactgactgttgctcactctttgaagtgatttgcgtcacattcagggaattcctcaatgcagcgcattatgtataaatcttaatcgccttggtttatggaagacgaattagcgtgttttgtaaatcagatgattaataacccgctttatcaatcacaaaggttttgccacagttacctgggtgaggttgtggcaagaaactgtttgcagaaagcggagcgttgatggcgtcagctttgatgctgatctgaatttcagtcaaatacgcagggttaccctggcacgttagcttaactgctttcacgttctcttttccccagcttttggcaaaggcggcgtcaaagtcacggcggctcactgttttaccgtaattatccgcaaggaattttccggcttcgctctctttaatttcttgattcaggcgtaccatcgtaccgaagtatgcgtccggatcaaaaccaaagcaggcaccgtgtttggcatattcgtagcgttccaggcaggaacgtccgccagctcctggcatgacttcacttagtttagcggccgtttccagacttaatccggtttccgggctactacacattcggctggcgcgcgcttctggtagattcgggattgggcgagtagcgcaaccgaagcgcatccagcggcgttcatcaacaccacgggcagcaacgcttttaggcaatcctggccacagaccatgtacggtcagaaaatcagctttgttggtcgtttcggtttgcaggcgacattcatctcgttcgttacgatttcgatcgtgttgactctggcaaaatccggtttgccaggagagggccaggacatagcgatcaaaatcgccatactgttttgcctgcaacgctaaggcgttggcagaagagaagggaagcagagaaaccgcgagcaacgcggcgttacgccagaatgctttcataatgggtgtggaactcatacatacactgaatactatctattaaatcataaaaaagcccgccaggtgggcttacctggcgggcgtgatgatttattcagcgtttggcgaacgtattagttccacatggcgagaatcggccagccaaccaacagcaacatagagatgtaaatcaccccgaagattgcgccaagacgccagtaatctttacttttcacatagccacagccgtaaataatcaccccaggaccggttgcatacggcgtcagacagcccatgataccgatagacagcaccagcaggatacacagttgttccattggtacgcccggaatacctttaccgacggccagaataaccggcagcatggttgcggtgtgcgcagacaggctggcaaacaggtagtgtgcaaagtagaacaccagaaccagtacaatcaccgttgcgtttggactgaatccttccaggtgcgtactcatggtaccggcgaaccagtcaataaaaccagaacgagtcaggccgttagccatcacaaccagagttgccaggttgaccagtgtgttccatgcgctgttatagcgggtaatgtctttccaaggcacaacgtgcagggccagcattaggctaactgccagcagaccaaccgcagtagcattaatgacttcactgccaaatacccacaaacctaagctgagcaatacaaggccaatcagtgtccactctctgcgtgtcagcgcacccatggttttcagttcatcacccgcccaggttgccacttcttcactgtgtgtgatttccggtttgtacagcacgtaggaaagccacggcgcaatgataagcaagataaccccaaccggcaggaagcagaggaaccactgcaaccagctaatctggataccggcaattttgctgacgaactccagacccagcacgtttggtgccgcaccggtgacaaacatggagctactcagactggtactaatgaccatcatccacatcaaatagccgccaatacgacgcgcggacggatcgttcgggaaacttttaaacaacggcggcaggtttttaatgaccggaaaaaccgtacccccggtacgcgcggtgttggaaggtgtaaacggtgccagcagaatgtcgataatgacaatcgcataacccaacgtcagcgtgcgtttgcccatgaatttcaccaggaaaagggcaatgcgacgacctaacccggaaacttcataccctaatgcaaaaataaatgcgccaaataccagccataccgtggtgctggaaaaaccagccaggccccatttcagcgcctgtttttgcgcattaaacgctgggtcagctaattctttggcatcaaagagcaggtaattactgccaataacgcaaatagtaaccgcaataaaactgatcgctgttgccggaattggctcgaggatcatgccgacaatcattgccacaaacacagcgaagtaatgccatgcctgcggcggcataccgtcggggacagggataagaaacatgacacccatcaccaccagtggggccaatagtttccatatattatcttttgctaaagacatacgggttctccgaaaattaatatttccaaatttatcaagtgcttaaataattaaatctgtgctaaaaaccaggtaaggatcagtaggtcagcactgccgcctggactgagatttcgttcgatacactccctgtcgaactgccggagataatcgagatcggcgggggttcgaatgccccctttttgcaataatgtttgcgcctcgcgctgtagccagcgcaggcccccctcgccaccgcggcttgcaacgttggtatcgccgttgatcgccatcagtaggagcaaggtatcgagcaatgccagttcaggatctaacccctgatccagcagagtgaggtaatgcggcaaggcgtgattgatcaccagtggataacccgcttcggcttcaccgcgtgcgccggtaaggccaagctgttggtacaaccgttgacctgccgtcagttgactattattggtacgcagttcgcgatcggtcaggccacggcagaaacttgccgccgtagaacaaacggttgttggcgttaccggttggttgagttgaagcaaacggccaattgccgcacatagcagccctaaagaaaaaatgctgcctttatgcgtgtttacgcccgcagtggcgcggaacatatcaccttcgcaagccataccaattgggcgtaatccgtggagtaccgcttctggtgccatttccgcactacaggcaccaaattcaatgaaacggggtagccagccctgaatcgccagcgcgctgcggtggaaatcttccagcgccatatctttgtgcgcaccgcagttaatgcgatccacgaggcctggtttcggactcagattgacttcagtcagcatggcgcgccagcccagcagggcgtactcatcgattaaactcgtcgcaagctttgtggttttagtactcgttgcaggcatgctcatcgttcagcagtgcctccatgttatttagttgacgttgcaggcatcgacatcgttcagcagtgcctccatgcggttgagtaaatcggtcagttgatgggtttttccacgcgcgcagacggctgcgctttgttcgcacaacaggcagcggcgaggcggcagactatagtcgcggcgggagagaatttcgccttcgggcgtcaggacatcgatatcccataaccgcccgagaggatgactatgttcaagctcaatggtggcgagcttgaggtcgcgagccggggcggcaatgctcaacatgccctccggcccgctggcggaaaccagtgcagcctgctcctgaatttgccagccctgttttgcggctaaggcacgcaaggctgtcacgccatgattaaaaattcggcgtgtgacctcgctgtctttaatcggcccaggcgcaaccacggtaaaggagaccagtggaacaggatggcgcttgagccagacgtgttgccgtgcttgcctttcatcccggctgacgagcagctcgggaatacttaccgcatggtggctggcgagttcaggaagcaggtgcatggcttattccttcacctgatgcacaacatcgatcacgctgccatcgcggtaacgcacaacggcaacgacgcggtctgtgaattcaatcggctgtggttcaccggtcagcagacgcgcacgttcgcgcagccactcaatggaaaccactttaatgcccgcttcctgcagacgttctgccagttccggacgtgccgggttaactgcgataccgtggtctgtgaccagaatatcgacactggagcctggggtgatgcaggtcagtacgttatccaccagagtcggaatacgaccgcgtaccagcggcgcgacgatgatggaaagcgcagaggcaatcgcggtatcgcagtgaccaccggaagcaccacgcagtacgccgtcagagccggtcagcacgttaacgttgaactgggtgtcaatttccagcgcgctcagtaccaccacgtcgagacgatcaacgcttgcgcctttgctaccccagttagcgtactggttggcgctgatttcgatgtgattggggttacgggccaggctttgcgcagcatggctgtcaaagctctgcacatccagcagtttgcggatcagacctttttcgtgcaggtcaaccatcgtcgcggtaataccgccaagggcgaagtcggcgcgaatatcgcggctacgcattttgtcttccaggaaacgggttaccgccaggcttgcgccgccggtgccggtttgcatggagaaaccttctttgaagtagccagagttgacaatcacatccgcagcgctacgggcaataagcagttcgcgcgggttagtggtcatacgggtcgcgccagcgccgatttttgcagcatcgccaacgcggtcaactttgacgatcaaatcaacctgatcttgctcaatgcttgccggattatgcggataaggcagcagttcttcggtaagcatcacgacctgttttgcgttgtcggcatcaactattgcatagccgagggagccgcagcaggctttaccggtgtagccgttggcattaccgaattcatcacaggacgggacgccgaggaaagccacgtcgatattcagttcgccgctctgtaccagatgcacacgaccgccgtgagagtggatctgcaccggttctgccagcagaccacgggagatctcttccgccagtggaccacgcaggccggaggtataaatgcgggtaaccacgccctggcgaatgtgttctaccagcggcgcatggcaatcactcagggagctggacgccagggtcaggtttttaaagcccatcttcgcgatgacgtccatcaccatattgacggtcaggtcaccgccacggaaagcgtgatggaaggaaaccgtcatgccgtcctgtaaaccagagcgacgaatcgcttcttccaggttggcgcacagtttgcgatcgcgcgctttttcagcctggtaggtttgctttgggctgttctggaaagcggcaagatcgcattcagcgcgacgattccaggccgctacccgttcttgtcgttgagattgttcaattttctgcgtcattttgattgccttattcttcgcggatgccggaaagttctgcacgggagagcaccagacgggcgcgatcgataaccggaccgtccaccatcttgccgttcagggaaaccacgccgaggccttcgcgagcggcggcttcagcggcttctacgacgcggcgggcgtgatccacttctttctgggtcggtgcgtagaggttgtgcagcagatcaatctgacgcgggttgatcaggcttttgccgtcaaagcccagctgtttgatgtgggcggcttcttgcagaaatccggcttcgttgttagcgtcggaatagacggtatcgaacgcctgaatacccgcagagcgcgcggcctgcaaaatggaacagcgtgcgaacagcagttcagttccttccggggagcgttctgtacgcaggttgcgcacatagtcttctgcaccgagggcgataccgatcaaacgctcggaagcgtgagcgatttccactgcgcgggtaatccccagcggagattcaatcgccgccagcaggccggtgctgccgggttcacgaccacaggctttttcgatacgcaggatctctttttcaatatccagaacatcctgagcggtatcggttttcggcagacgcacaacgtccgcaccaccgcgaacgacggcttccaggtcgttaacaccccattcggaatccagcgcgttgacacgcacaatggtttcaatatcgcgatacagcggatgttgcagcgcgtggtaaaccatgcggcgggcggtgtctttttcacgcaatgctacggagtcttcgaggtcaaacatcagggcatcagccgggtagatgaaggagttgctgaccatcgcggcattggcaccaggcacaaacaacatgctgcggcgggtgcgagttttacgttgttgcaggctagcggaaatcattggcaatcctcccatggcagagccgggataccgctggcgcgtgccagcagggcttccagtcgtgcacgtaaaatgcagtacagtgcgcctttgtcatcgacattcagctgtacgccgcgcacgttgtagcgggcgagaacgtccagaatggtggtgcgaattgcatcgccaaactgtttctcaacgctgctattgatttgcaggtcgatatcctgcgtatcgagtggggcgatgcgtatcatcacatccccagactcaagggtgcctgcaacggcgggctggtttattttcatttttcacctgtttctcatgcgggggtcttttgacgagctgccgcgtcctggcgggagtgctcaagcaggttctgcaaataatgcagcgtgactgcagggaccagcggcgcgatagccgtgagatcgtttttcgccagcagttgacgtacccgggaagcggatatcggcatctcctggtaacgcagccgctcaatttcaaccagttcgatgggcggtgcggagatagtcggcgtttccagccagtagcgcatatcctggttgtactgggcggtaacgcgacaaaagggttcagtaccgacaaagcggtgagttacacccagcgcgggagcgaggtactgacggaaaatcttcagatcaatttcggtgtaacaatggttaatgacgctctgttctttaatgaagtagcaagggaacgtagcgcgggagatgatgtattcggagccacgatgcacagtcaggcgtggaatatcggcggtgccttttaacaccaaatccagccggtcttcataggggaagcgactagaatcttctttgactaaaaacagatgcaaccagtcgcactgtgccgcagcctgttgaatcagataacggtgaccattcgtaaagggattggcgttcatcacaatgcagccaatcttgttccctggatgacgaaattttttcaggctttcggcatagcgtttcagtcgcgtggcgctgttttccatcagcaccatcacgccgggtacgctggtcagcgtggaaaaaccgcactggcggaacagcgcctcgtattcggttttggtataaataaacagatgcgtgctgtgccgctcataggcgaggtttatcaattcagtggctaatgtcagcgccagtccttcaccgcggacggattcactgatagcaacgcatttaataatatttccggcaattccaccgcacgcgataagcttttcatcgcgggttacggtaataaatacttcgactgtggtgtcaacgctcaaatcattttcatgcaggaattgggcgatttccgccatttttttattttcactacgttttacgcgggtgaaaatatcattgccgaacataataaatagtatcctgaaggtgcatgttgttatcgatttgcaacgaatgttgttcaatgttgcaaactgataaccttttattttcacttgggagaaagggggtgatcgaggtatatctttttctcctttcgctatacatcctaaggagtatttcggcgtgaaattttgatttatttcacatagagttagtggttttttatttatttaatgattttaagttttttaattaatgtaattacgaaatgactcgcaggtttaagtgatttaattgatttaatgaataaaatttgccacgatcataattaatatctatgtattttgattcaacattttaattacatccgtcaaagaggctcgggacaacccgcaaggaaaacaatgttgcagcttaacgagaataaacagtttgcatttttccaaagactggcatttccgctgcgtatctttttgctgattctggtgttcagtatatttgtcattgcagccctggcgcaatattttacggccagttttgaggactatttaacgcttcatgtacgcgacatggcaatgaatcaggcgaaaattattgcctccaatgacagtgtcatctctgcggtgaaaacgcgtgactacaaacggctggcgaccatcgctaacaaattacaaagagataccgattttgattatgtggtgattggggaccggcacagcatccgcctttaccatcctaatccggagaaaattggttatcctatgcagttcaccaaacagggcgcgctggagaaaggggagagctacttcattaccgggaaagggagtatggggatggcgatgcgcgccaaaacgccaatctttgatgacgatggaaaagtcatcggcgtggtgagcattggctacctggtgagtaaaatcgatagctggcgggctgagtttttattaccgatggcaggtgtgtttgtcgtgctgttagggattctgatgttgctgagctggttcctggccgcgcatatccgtcggcagatgatgggcatggagccaaagcaaatcgcacgcgtggtccgtcagcaagaggcgctgtttagtagcgtttatgaagggctgattgcggtggatccgcatggttacattaccgccatcaatcgtaacgcaagaaagatgctggggctgagttcccccggacggcaatggttgggtaaacccattgttgaagtggtcaggcccgccgatttctttaccgaacagattgatgaaaaacgtcaggatgtggtggcgaactttaacggtctgagcgttattgccaaccgggaagctattcgtagtggtgatgatttgctgggggccattatcagctttcgtagtaaagacgaaatttccaccctcaatgcgcaactgacgcaaataaaacaatacgttgagagccttcgtacattgcgacacgagcatctcaattggatgagcacgctcaatggtctgttgcagatgaaagagtatgatcgcgtgctggcgatggtgcagggggagtctcaggcccagcaacagcttattgacagcctgcgcgaggcgtttgccgatcgccaggtggcggggctgctttttggtaaagtgcagcgcgcccgggaactggggctaaaaatgatcattgtccccggtagccagcttagccaactgccgccaggactggatagcaccgagtttgcagccattgtgggcaatttacttgataacgccttcgaagccagcctgcgtagcgatgaaggaaacaagatcgttgaattattcctcagcgatgaaggcgatgatgtggtgattgaagtcgccgatcagggctgcggcgttccagagtctctacgagacaaaatatttgagcagggggtcagtacgcgtgctgacgagcccggtgaacatggcattgggttgtacttgattgccagctacgtaacgcgctgcggtggtgttatcactctcgaagataatgatccctgcggtaccttatttagtatctatattccgaaagtgaaacctaatgacagctccattaaccctattgatcgttgaggacgaaacgccgctggcagagatgcatgcggaatatattcgtcacattcccggattcagtcagatattactggcgggaaatctggcgcaggcccgaatgatgatcgagcgttttaagccggggctaatcttgctcgataactatcttcctgacggtagagggattaatttactgcatgaactggtgcaggcgcattatcccggcgacgtggtgtttaccactgcagccagcgatatggaaacggtgtctgaagccgtacgttgtggtgtatttgattatctcattaagcccattgcctatgaacggctggggcaaacgctaacccgtttccgccagcgtaaacatatgctggaaagtattgatagcgccagccagaagcaaattgatgagatgtttaatgcttatgctcgcggtgaacctaaggacgagctaccgaccggcattgaccccttgacgctaaacgcggtgcgaaaactgtttaaagagcctggtgtgcaacatacggcagaaacggtggcgcaggcactgaccatcagccgcaccactgccaggcgttatcttgaatattgcgccagccgccatctgattattgctgaaattgttcacggcaaagttggcagaccacaacgcatataccacagtgggtgacatgataaagccggaggaaacttgcctccggcattactatttacttgcctgtgaccgctgctgccgttcctggcaccatcagctctgtagcaacgataacaatcaccaaaccaacaagcaccggtacgctggtgcgttttacgacttcaaacgggctgatcttcgccatcccggcaaccgcaacgactacgccagaaacggggctaagggtacggccaaggttactcgcctgcagcatcgggatagtcaaatacgccgggttaatgccggaagagtgcgccagtttcgggatcatctcaacaaacgcataaaacggcgcattgccactaccggtcgtgactgccgccagcattgtcagaatcaccaataccagcatcaggatgatactcgcgctaccaaagctggtagcgatagaaatcagactttgaataaagccgatggtgctaagcccctgagcgaataccccagcggcaaccagcagcatcaccacgttagcaaacgcatctgccatcccgcgataagccacttccagaccagagaaaactttctgggtattaaagctgcggaggaactccagaatggaggcaatcagcatacaaatcaccagaatagtgatgatgtgtaattgcggaccccatttaccgtcaaaaatcagtacaccgatgatcggcgtgaacggcaaaatggcataaaacgcaggagcagtggtggtgatttcactgacatctaacatttcatgagagatgtgctcttttttatccagataacgttgccagaagaagtgggcgatcgccatgccgataattgcagcaatactgataggcagcgtcgttttgaaggcgaagtcaatcaggctcatttcggaagcttgcgccgccagcaccacatccccactagtcggtgcgagaataatcgccgccggggaggcacaaatggcagcagctgcgccacgactgataccaacgtttaccatcaccggaaatagggttgccatcagcaaaacacccagaccggttgcggaagagacggccagagacatcagacaggcgacaaaataggcggcaatcatcagcaggtaaggggagttaatatactgcaatggtttactcgccagcttgaccaccatatcattcgcgccgatatgggtcatgtaagcggcaaatccacacagcatcataatcatcatgccgaggtcgccgccgcggctcattagtaatattttaacgtattcaacgatatccgtggcgctgtagcctgtactagcctggctggacggtaacactttgtgccccataatggcactgataatcagcaataacaggccaccgacaaataacacaccagtggcggaataccctttaatgatgtagcgagctacacccacaataaccacaaccccaataaggagctcaatgaatgtcagcataatttttcctgtctccaggccccaaagtaaataataaaaaattcctaaagcttaaggaaaaaatatgcccaataaattggcgatgaatgctgattaaaatcaagaaaaactgccattaagacattgaagttgctgtttttatacatagataacaaaacgcatatttagcggttggcaattatcacataataatgtgtgcaaattgatggtggattgatgcaaatttgttaattgcaatggtgttagctgcggctgtgcgctcaaaaaataatctaatatgagcataggttgacgatatatattatatacttcgttaagatgattgttgtatctcgttaaaaaataaaataatttttccttgattgcattttgtcatcaaaaaagacttggtttttcttttttgactattcccatcgcagaaaacgacgcatcatctttaatcgatgcgcggaaatatttaacttgaacaagcggaaataaatagagcagctattcagattattctttatgttgggtctattaaggttatgttaattgtagctttgctatgctagtagtagatttttgataaatgttttatggtcacaaatgaacgtgagtaaatatgtcgctatcttttcctttgtttttattcagttaatcagcgttggtaaagtttttgctaacgcagatgagtggatgacaacgtttagagaaaatattgcacaaacctggcaacagcctgaacattatgatttatatattcctgccatcacctggcatgcacgtttcgcttacgacaaagaaaaaaccgatcgctataacgagcgaccgtggggtggcggttttggcctgagccgttgggatgaaaaaggaaactggcatggcctgtatgccatggcatttaaggacagctggaacaaatgggaaccgattgccggatacggatgggaaagtacctggcgaccgctggcggatgaaaattttcatttaggtctgggattcaccgctggcgtaacggcacgcgataactggaattacatccctctcccggttctactgccattggcctccgtgggttatggcccagtgacttttcagatgacctacattccgggtacctacaacaatggcaatgtgtactttgcctggatgcgctttcagttttgagacaaatgaagttttagtaacttctttaaaatcaatagctaaaataagtaacatcaaaaataacgcgacttttatcactttttagtaaagttacactggacaaagcgtaccacaattggtgtactggtaaccgacacagcatttgtgtctatttttcatgtaaaggtaattttgatgtctaagattaaaggtaacgttaagtggtttaatgagtccaaaggattcggtttcattactccggaagacggcagcaaagacgtgttcgtacacttctctgcaatccagactaatggttttaaaactcttgctgaaggtcagcgcgtagagttcgaaatcactaacggtgccaaaggcccttctgctgcaaacgtaatcgctctgtaagatacgtcagcaagaattcaaaacccgcttaatcagcgggttttttttggtctttagtgtgcggtactggcgctaaacagccagaatgccagtgcggtcatggcaaaagaccccagaaggttgacgaaaacgttcagtaatgcccagccaaagcggccctcttgtaacaaaaacaccacttctgcgctaaatgtactgaaggttgttagaccgccacaaaatccggtggtgattaatactttccacactggatcaatgttcgtcatcctgctgaaccatgcgaatcctattcctatgatgaatgccccaatcaggtttgctgtcagcgtccccaacggaatcgcctgatgcagtgggttaaatcgcatacttaacagccatctcgccacgcttcccgtaccaccgccaataaaaactgctaaaagaagttgtaacactgcaaaatcctgctatttgatttgtatgagtgataagtgtaacgccgaataatcgtcgttggcgaattttacgactctgacaggaggtggcaatgctggttgccgcaggacagtttgctgttacatctgtgtgggaaaagaacgctgagatttgtgccagcttgatggcgcaggcggcggaaaacgacgcaagcctgtttgccctgccggaagcattgctggcgcgcgatgatcatgatgcagatctaagcgttaaaagtgcacagctgctggaaggcgaattcctcggactttacggcgagaaagtaaacgtaacatgatgacgacaattctgacgattcatgttcctagtacgccggggcgcgcatggaatatgctggtggcacttcaggcaggaaacatcgtcgcccgttatgccaaactgcatctctatgatgcatttgccattcaggaaagtcgccgtgttgatgctggtaatgaaatcgctccgttactggaggtggaagggatgaaggtcggtctgatgacctgttatgacttacgctttccagagctggcgctggcacaggcattacagggagctgaaatcctggtacttcctgccgcctgggttcgcgggccgctcaaagagcatcactggagtacgttgcttgccgctcgtgcgctggataccacctgttatatggtggcggcgggggagtgcgggaacaaaaatatcggtcaaagccggattatagatccctttggcgtcaccattgcggcagcgagtgaaatgcctgcactcattatggcggaagtgacgcccgaacgtgtgcgtcaggtgcgcgcgcaactgcccgtcttaaacaaccgtcgctttgcgccgccgcaattattatgatgtttttttactcggcgcttgattcaccttgttacagattgctattgtgtgcgcgcgtcgaatgaccgttaatattctctggtttttaaggcgcgttctgttgccggttatatgtcaagaaggtatctatgggtgagattagtattaccaaactgctggtagttgcggcgctggtcgttctgctgtttgggactaagaagttacgtacgctgggcggagaccttggagcggccattaaagggttcaagaaggcgatgaatgatgacgatgctgcggcgaaaaaaggcgcagacgttgatcttcaggctgaaaagctctctcataaagagtgacgtggcgagcaggacgctccctcaatatcttgttcgatacaaaaaacccgcttcaaaaagcgggttttttatcagacagatgtaagtaattattacaggattacttaacttccatccctttcgcctgcaaatcggcgtggtaagaagagcggacaaacggaccgcatgcagcatgggtaaagcccatcgccagcgcttcggctttcatttcgtcgaactcatccgggctaacgtaacgttgaaccggcaggtgatggcggcttggctgcaaatattgccccagcgttaacatcgtcacaccatgacggcgcaggtcgcgcattacctcaataatttcttcattggtttcacccagtcccaccatcagaccagacttggtcgggatttccggatgcgcttctttaaagcgttccagcagcttcaggctccagttgtaatctgcaccaggccgtacctgacggtaaatacgcggtacgttttccaggttatggttgaacacatctggtggcgttgcagtcagaatatccagagcacgatccatacgaccgcggaaatccggcaccagagtttcaattttgatttgcgggcttttttcccgaatggcagtaatgcaatccgcaaagtgctgggcaccgccatcgcgcaggtcatcacggtcaacggaggtgataaccacataacgcagcgccatatcggcaatggtctgcgccagtttcactggttcattggcatcaggagctaccgggcgaccgtgggcaacatcacagaacggacaacggcgggtacaaatagcgccgaggatcataaacgttgctgtgccgtggttgaagcattccgccaggttagggcaggaggcttcctcgcagacagaatgcaggccatttttgcgcattgcggctttgatgccctggatacgtgtagagtccgctggaagcttgattttcatccattccggcttgcgcagcagggcttcgcgctctgttgccacgtttttaaccgggataagggccatcttatcggcatcgcggtatttaacaccgcgttccatcacaatgggtttactcatagcgtgcgtgttccagttgcgaattacgaaggaaagcgtttcaattcaatagattgttgtaattatcaactatttttgaattaacgactggcagtatatcattgaaacggacctgaaagcagccaaagcggtcgcgaaaatgtaaaattgttgttggattgtgccattttatcgttctgcgctgtgatctggctgtaacaatactttttcaaaatgcattacggataacatctattactccgtgcaggatgggatcacgcaggctgaatttgttgtagtggatagagaaatctatttgctcctcatttaaggacggaaaaggcagtttttccagcggccagcagcggctaaacaggttataaaaacggctgggaataatcgctaacatgtcactgttggcaaccagtgcagcgattgtcaaaatgttgtagctggtgaaattgatttgccggtccggaaacatttcttgaactctctgccgcagaccgctgaaattttgctcttccggtaacagaagtacatgcgcagcgttgtcgatagtctctctgtcatcttctaaagagagtagtggatttccctcgcggcaaattaacaccatattgtcggtgaacagaacatgatgttgcaccgtacgattggtgcaaaacatgttatcgatgatgagatcggtttgaaactgactgagttggttttccgcgtcgctgatgggcgggttgcgcagtaaaagctgcggatagtgagttttaatcgcccgatagatgacaggaaggaccagtgctccgacgctgggagtggtcgcaatagttatcgttcgttgcttatcatagcttccttcgatatccagcgcgccaagaatggactcaaggccctgactgatatactcatgtagatgcatcgcaaatgcggtaggagtgacaccctggcctttgcgaataaacaatgggtcagggaatataacgcgcagtttctgaatagactgactgattgcgctgggggtcagattaagcactttcgctgcattaacgatccctttatgtacatatacagcttcaaaaatagtcagaaggttaagatcaatatttcgtaaggttgtaaatatttgtggtttaccttcactgctctttctgcttaaacagggttcaatttgattattactatccacgcacttactccaattttattcatggaaaaataatatttaaaaaattacaataatcttatgtctaattggaacggaacgcttttgctcaccataatcaactatttcaataggttaatcaatggggtgagttacggagcaaggcgtggcaccgcatttctgcaagtgataaagaaaatatacaaacgcgaaggagatgtaaagcattagcagatattatgagtaatgacccagtgtaaattgggccattgatgtatggaattaagcggtaatatattcgaagtccggattgtttagtagcgctaaaatattttccagtaaacgtggagcaatattattagtcgtcgcttcgggtttccattgacttattttagccatttccattccggcatacccacaaggattaatacgtaaaaatggactaagatccatattgacgtttaatgccagaccgtggaaactacaaccgcgtcgaatacgtaaacccagactgcaaattttcttttccccaacatagacacctggcgcgtcagcccgaggatgcgcttctatacccagttcagccagggtattcaccactgtttgctcaagcaaggtcaccagttcacgcacaccgagtttacggcgtttcaggttaagcaacacatacatcacctgttgccccggcccgtgataagtcacctgcccaccgcgatcgctctggatcaccggaatatcacccggcattaaaatgtgctccgcttttcctgcctgaccttgggtgaataccggatagtgctcgaccagccagatttcatcaagggtactatcatcgcgggtatcggtgaattcatgcatagcctgggagattggctcgtaaggctgaagaccgagctggcggacaagaattttatcctgatacaaaacggcatctccgtggagaatgagtaaaagtgggggaaaagtatatcacagcgaggagaggggagttacccgaccaggagccgggtaacggagaagcgagttacagaaccatgcggacaatatcgattttgcccagttcttcatacagtgtttcaacctgctcgatatgagtggcgttgatagtgatagatacgctgtggtagttgcctttgctgcttggttttaccgttggggtgtagtcacctggcgcatggcgctgtaccacttcaaccacctgatcaaccagctcaggtaacgcctgccccataactttgtaagtaaaaggagtagggaattcaagcagttcgttaagtttggttttcatgtcagctccggcgtaacgtaattaaatagcaactcccgccagaaggcgggagttttttactgatgcttagtatatggggacggaaattacactttcaagtgtttaatttttaaccaaaccagtgatggaacattaatttaatgtaatcaatgattttgccgaagaagttaccttccgggatttcttgcaacacaaccagcgggcgttgctcgatcgttttgccatcaagctggaagttgatagttccgacgacctgattcttttgcagcggcgcatgcaattcactgctgttcagcacatagctggctttcagatctttcatgcgaccacgcggaatggtcaggtacacgtctttatcaacccctaagctagcgcgatcagaatcaccaaaccaaaccggttcagaggcgaactctttacctactttcagtgggttaacggtttcaaagaaacggaagccccaggttagcagttttttactttcggcttcacggcctttaaaagtacgtccgcccattaccgcagaaatcaagcgcatctggccttcagtcgcagaagcaacaaggttgtaacctgctttgtcagtgtgtccggttttgatgccgtcgacattcaggctgttatcccataacaggccgttacggttcagctggcgaataccgttaaacgtaaattctttttctttatagatgctgtattcattcggtacgtcacggatcaatgcctggccgatcagcgccatatctcgcgcggagctgtactgaccatcagcatccagaccatgtaccgtctggaagtgggtatttttcaggcccagtgcgttaacgtagctgttcatcaagccaacaaaagcgtcctggctaccagcggcaaaatcggccatggcgacacaagcatcgttaccgctttgcaggttaataccgcggatcagctgagaaaccggaacctgcatgcccggtttgaggaacatcaggctagaacctttaaacaccgggttaccggtggcccatgcgtcgttgccgatagtgactaaatcagtttctttaaatttaccggctttcattgcctggccgataacgtaactggtcatcattttggtcaggctggcaggatcgcggcggacatctgcgttctgttcggcgagcactttgccggagttatagtcaatcaggatgtaggactccgcatcgatctgcggtacacccgggatcatagttttgatattcaggtcatcggcatgtgcagcagagataaaggctgtgcaaagagccgtggtgagcgccaggcgcttcatgatacgagcggaaaaaatggtattcatggtctgaactacgacatccgtgatggaattaaaaaagtgccctactatagcaaatgcactaccggcaggcatctgactttccgcgtgactttgttaacgtcatttacagaaattgacacatcagatgcctgctttacgttactgcgcggtagtaataaaactctgtaattgggcttcggtttgcaaacgttgctgcaaggtactggcttcggctttgctggcgaatgggccaagctggatccgccagaccgcgccattttgagttacgcgaccggggacgccgaacttctgtcccagttgctgttggtactgttgcgcacgagcctgatcgcttacggccccgacttgcaccataaagttgccgctggcgctttggctgacggcttgcggtgtcaccattgcagggctggttgcaggcgttgtgctcggagctgtaacaacgggctgtggcgcaggcgtcggttcgctgccttccagtacaccaggcgctaaggtcgttggtgcgccgaggaaaccgctactggttaccggcgcgccggtcggatcttcgctttttagcgtgctattactgaccggaagaatgtcaccctgcgggccagacacactacttgttcccgcgccaccgcttaaatcgggaggtgcaggcagggcgtaagtctgtttggcgactgtggtacaagccataccaggaccagaaaggctaccatcctgggcaacaataatcggatcgatacgaactttggtgttgttactcgtgttaagacggtcagctgccgcgcgagaaagactaataacgcggtcgttgccgtaagggccgcgatcattaatgcgcaccacgatcattcgcccgttagccaggttagtgattctggcgtagctggggatcggaagcgttggatgggctgccgtcagctgtgtcggatcgaatgcttcgccagaggccgtcaggttactgccgggttcggcatcatagattgccgccagtcccgcctggctaaatcgagacggatcctgcacgattttgtagcttttaccgtcgcgctggtaatcctgatttgccgtcgcgttcagtggttcgaaacgcgggtccgccccgctaatttcaactatagggccgttacataccgcaggctgcggtacacttaccgtctgttgctgaccatcatcgcttgtacatgccgcgagcattcctgccgcgatgcagatcccgagccactgcttacgcattgcgcacctcttacacgcttttgctcaacattttcctgtgggtgtggatactcattacaatcccgaacccagccatcagcacaattagcgcgcttcctccataactgaccagtgggagcggaacccctacaaccggcagaataccgcttaccataccaatatttacgaagacataaacgaataatatcagcattaagccgccagccatgacgcgaccaaaggtggtttgcgctctggcggctatccacagcccgcgcatgatcagcagaatgtagagagcgagcagaatcagaatgcccactaatcccagctcttccgccagtaccgcgaagataaagtcagtatggcgttcggggagaaattcaagctgactctgagtgccgtgcagccagcctttgccgcgtaatccgccggagccaatagcaattttagactgaataatgtgatagcccgcgccgagtgggtcactttccgggtccaggagcatcattacgcgctggcgctggtaatcatgcatcaggaagaaccacagaatcggaatgaacgccgctaccagcactactgcgacgccaatcagacgccagctaaggccagagaggaacagtacaaacagaccggaaagcgcaacgaggatacttgttcccaggtcaggctgtgcagccaccagcagcgtgggcataaatatcagcaccagcgcgatgccagtgttcttcaagcttggcgggcaaacgtcgcggttgataaagcgcgcaaccatcagtggtacggctattttggcaatttcgctcggctgaaaacgaacaataccgaggtccagccagcgttgagcacctttagagatggcaccgaaagcatctaccgccaccagcaaaataatacagatgatatagagatagggggcccagccttcataaacgcgtggaggaatttgcgccatcaccaccatgatgaccagacccatcgcgatttggccgattttacgctccatcatgccaatatcctgaccgctggcgctccagataaccagggcgctgtaaaccagcaatgccagtaagatcagcagcattgtgggatcgagatggactttatcccagaatgtttttttattcggattatccgtcatgattaatggtcctccgctgcggcaaccgctggattttccgcaggcagatcggtgttgttatcacccagcataatgtggtcgaggatctggcgcatcagtgtaccaaccgccggacccgcaccaccgttctccagaatcatggcgacagccacttgcggattgttgtatggcgcaaaggcggtcatcagtttgtggtcacgtaaacgctcggcaattttgtgcgcattataggtttcgttcgctttcagaccgaagacctgagcggtaccggatttcgccgcaattttgtacggtgcgctagcaaagtatttatgcgccgtaccgttagggcggttagcaacaccgtacataccgtctttcgccagctcccagtaaccggaatgaatatcgccgacgggcggttcatgcggctgtacccatggcacctgtttgccgtcttcggcggtgctcatcagcaaatgaggaaccttcacgataccgtcattaatcaggatcatcagtgccttactcatctggattggggtcgctgtccagtaaccctgaccgataccaaccggaatggtgtcaccctgataccacggttttttaaagcgtttctgtttccattcgcgggtaggcatgttgccggaacgttcttccgccaggtcgataccggtgtaatgaccataaccgaatttacccatccattcggagaggcgatcgatccccatatcgtaggccacctgatagaagaaggtatccgcagattcttccaggcttcttgtgacattcagacgcccgtggccccattttttccagtcacgataacgtttttcgctacctggcagttgccaccagcctgggtcaaacagcgtcgtattgcgcgtgatcaccccggcgctcaatgcgctaaccgccacatagggtttaactgtagacgcgggaggataaaccccctgtgtggcgcggttcaccagcggtgtattcggatcgttcaacaaggcggaataatctttgctggagataccgtcaacaaacaagtttgggtcataactaggcgtggaaaccagcgccagcaccccacctgtacgcggatcggtgactaccacagctgcgcggctacccgccagcagcgtttcaatatattgctggagtttgagatccagcgtcaggtaaatatcgtgtccggcttgcggtggtacttcttttaactggcgaataacacgcccacggttgttaacttcaacctcttcataaccggtctgaccgtgcagcacatcttcatagtaacgctcaatgcccagcttaccgatatcatgcgttgccgcatagttggccagtttgccgtcattattcaggcgttcgacgtctttatcgttgattttgctcacatagccgatgacgtgggtcaacgcgctaccgtaaggatagtaacgacgtttatagcctttaacttcgacacccggaaaacggtactgattgacggcaaagcgagctacttgtacttcggtcaggttagttttcaccggaatagaggtgaaacggtgactacgtgcgcgctcttttcggaatgcagcaatatcgtcatcggtcagatctaccacgctgcgcaaagcgtccagcgtttgctgcacgttatcgactttctccggcatcatttctatctggtagatagtgcggttgagggccagagggataccgttacgatcgtagataatgccgcggctgggcgcgataggcaccagcttaatgcggttttcattagagcgggtctggtagtcggtaaagcgaacaatttgcagattatacaggttggcgataagcacgccggtcagcagcaaaatccccaaaaaggcgaccagcgcccggcgcacaaacagcgcggactctgccgtatagtcgcgaaaagagttctgtagtttcatccgctgcgttttctactcaaagctcccttatcactcacggtgataaggatggttggtggtgatgctccacgcccggtacagactctctgcgaccagcacgcgaaccagcggatgggggagggtaagcgcgctcaggctccagctctgctcagccgccgctttacaggcagggctcaacccttcaggcccgccaatcagtagactgacgtcgcgaccatccagcttccagcgttccagctcagcggctaactgcggcgtatcccagggcttgcctggaatatcgagggtgacaatgcggtttttgcctgcggccgccaacatctgctcaccctctttgtcgagtatgcgcttgatgtccgcattcttgccgcgttttccggccggaatttcaatcagctcgaagggcatatctttcggaaaacgacgcaggtactcggtaaaaccggtttgtacccagtccggcattttcgttcccacggcgacaagttgcagcttcacgcattaactccagagtttttccagttcatacaggcgacggctctcttcctgcatgacatggacaatcacatcgcccaaatccacgacaatccagtcggcgctgttttcaccttctacgccgagcggtaacaggcccgctgcgcgagactcctgcacaacgtggtcagcaatggacataacatgacggctggacgtacccgtacagatgatcatgcagtcggtgatgctggatttgccctgaacgtctaaggcgatgatgtcctgacctttgaggtcatcaattttgtcgataacaaaatcctggagtgctttaccctgcaagttttccccctgggtgaatcaaatagataaaaatggtctgtcagtatacctgaaccagaggcgatttcgggacaattgtcgccgaatcggctttcgaaagtgggctatcatcccaccccgcgccgcagattgcatcgccatttttgtaaaacaatttctacaaagtcgtgtctggcggaaaaagtctggctgcggagaatatcagcctgcccgggtctgtcaatggtcgttgcggcttacccgtaaaaaaacagaaaagtcatgcattctcgaccccgatggcacggctattgaggacgcgtagcgtcgcgaatttttggttgatatcaatggcgctccaacacccctggtcaacgcgaaaatgccacatagcttcggcaggcatgccaattaaacgggcgattaacagactcagtacaccctgatggctgacgactaaaatattctgatagtgctgaaattcactaagccttgcgataaagcgttccacacgttggctaaatgcctgaaatccttcaccgttcgtggggattgcatgctgccagtcattgcaccacgcgctatagttttcggcatcttcttgcatgaggtcgcgatgatgtcgcatctcccagtcgccaaaaaacatttcgttgagttcaggtatgatttgcacggggagctggcggtcactgagaaccagtcgcgcggtatgctgtgcccgttccagttcactgcataaaaccagatcaaaggaaacaccatgtagcagcgtatgcagattttgcgcttgctcaataccgcgcgcggtcaggggggtgggcgcatgaccgctgtaaagaccatcgatattcgcttgcgtttcaccatgacgaattaaccacagtcgcatcatgccctccgtaacgacaggtatcagcgatacaagccttgttggttaatgtaagtcagtaccggttccggcaataaatcctcacaactttcaccgttttgcaaacgttcgcggatgatggtcgcgctgatgttaaaccacggcgtttcagccagataaattttaccggcaggctgaaggtgaagatcttccgggttatgtgtcaaatgatcttccagccattgctggtattgcggttgcgccatttcaagtgggtaacctggacgccgacagacgatcaaatgtgcattgtcgagtatcgtttcgtattcgtaccaggtcggaaaggtcagcagactatcctgaccaataataaacgccagcggcacgtccggtccttgttcctgccgccactctttcagtgtttgcgcagtgtaagagggggcattgcgctttagctcgcgttcatcaagagtaaataatggcttgtcggcaatcgccagttcaagcatgtgtttacgctgcacgctgttcgcttccggctggggacgatgcggaggaacattattagggatgattgtgacccgcgtcagaccaatcaaattcgccagcgtttccacgggttttagatgaccatagtgcaccggatcaaaggtgccgccaaacagagcctgtaaagatttcatatcaaccgtcgataaatacgtccgccaggggtttatggcacaacagaagagataacccttccagctctgcccacacactctgaccgtaatcttgtttgagggtgagttccgttcgtgtcaggagttgcacggcctgacgtaactgcgtctgacttaagcgatttaacgcctcgcccatcatgccccggcggttctgccatacccgatgcttatcaaacaacgcacgcagtggcgtatgggcagactggcgtttcaggttaaccagtaacaacagttcacgttgtaatgtgcgcaacaaaataaccggttcgctgccttccagacgcagttgctgaagaatatgcaatgcgcgcttactttttcccatcaacaaagcatcaacccaatgaaaaggggtgaaatgcgcggcatcattcaccgcctgttcaacgcgcggtaatgtcaatttgccgtctggccagagcaggcttaaacgctccagtgcctgagccagcgccagcaggttaccttcataacagtagcagagcacctgatttgccgcgtcatccagttctaagttgagctgttttgcgcgcgcagcaacccagcggggaagctgagcctgctccggtgtctgacaggtcacctgcacgctgcgattcgcaagcgcagtaaaccaggcggcattttcttgcgctttgcttaatttattaccgcggacgatcaacagcaggtcgtcatgcagaagtccggtgagtgtgagaagttgctcattgatcgccgcattcggtccgttttctggtaacaacagcaatagcgtttgtcgactggcaaacagactcatagcctggcataagctaaagatcgcattccagtcagtgttgggatcaatggaaaaagtgtggtgttcttcgaatccttgtgccgcagctacctgacgaacagcgtcctggctttcctgcaataacagaggatcgttaccaagtaaaagatacgccgcgcgcagcccttcattgagctgcgcgcggagttgttccgggtacaaccgaatcatcagttacccagcgtggtggagacgcgtgcaggcgttgccggagtatccgttgtggtgctcgtctgttcttcgtcggaacgaatatccgcagcacggatgcttggcagcttacgaatcagctgttcggcagcacggtcgtacatctcttttacgatcatgtcttgttcgttatctttcgctaacgccatttgcgggttatcgaagaagctacggaagactttggcgctaatcgggtagatatcacggccggggatcaacacggtcgcattaaccgtcatgatcatctgatactctgctgtttgaccgttacggaatacgcttgcggtatctttcgcgatgctcactttacccaaacgcaaggatggaacgtccttacgcgtggtttctttatcaagcaactcgacaccattcagacgtaactggttacgcaccgcacggcttaatggcccgttcggatcgccactgtccaggatcatgaccttcatagtggaaggaacctgcgtggtatcacgcagatgccagccacacccggcggtgattaacaccgccagagataacaacaatgttgccagatatcgcacgcttcctcccgcgcttagccaacgaccagattgaggagtttacctggtacgtaaatcactttacgtacagtaacgccatcaagatattttgctaccagatgttcctggccagcacgttcgcgaacctgttcttccgttgcgtccaccggaacggtgattttggcacggactttaccgttaacctgcaccacgaccagcgtggagtcttccaccatcgctttttcgtcagcaaccggccacggcgcgttgtcgatatcgccttcgcctttcagttcctgccacagcgtgaagcagatgtgcggggtgaacgggttaagcatacggacaacggccagcagtgcttcctgcatcagagcgcgatcctgctcgccatcggttggtgctttcgccagtttgttcatcagctccataatcgccgcaattgcggtgttgaaggtctgacgacggccgatatcatcggtcactttagcgatcgttttatgcacatcgcgacgcagcgctttctgattttcagtcagcgcatcaacgttcagtgccgcaacatcaccttttgctgtgtgctcgtaaaccagtttccagacacgtttcaggaagcggttagccccttccacaccggattcctgccattcgagagtcatatcagccggagaagcaaacatcataaacagacgaacggtgtccgcgccgtaacgttcaaccatcacctgcgggtcgataccgttgttcttgctcttggacattttgctcatgccggtataaaccagttcatggcctgccgcatctttcgctttcacgatacggcctttctcgtcacgttcaacgatagcatcaaccggggaaacccagttacgttcgccgttttcgccaacatagtagaaggcatctgccagcaccataccctgacacagcaactgtttcgctggttcgtcagagttcaccatgcctgcatcacgcatcagtttgtggaagaagcggaagtagagcaggtgcataatggcgtgttcaataccaccaatgtagatatccaccggcagccagtagttagccgcttcggaatccagcataccttctttgtactgcgggcaagtgtagcgcgcatagtaccaggaggactccataaaggtgtcgaaagtgtcggtttcacgcagtgctggcataccgttaacggtagttttcgcccactccggatctgctttaatcgggctggtaatgccgtccattaccacatcttccggcaggatcaccggcagctggtcgtccggggtcggcattacggtaccgtcttccagcgtcaccatcggaatcggcgcgccccagtaacgctgacgggaaacaccccagtcgcgcaggcggtagttcactttacgctcgccaacgcccatcgcagtcagtttatcggcgatggcgttgaaggccgcttcatggtcaagaccgttgaactcgccagagttgaacagcacgcctttttcagtcagggcttgctgagaaagatctggctcagagccgtcagctgccaggataaccggtttgatgttcaggccgtatttagaggcaaactcgtagtcgcgctggtcgtgccccggtaccgccataactgcgcccgtgccgtactccatcaatacgaagtttgctgcccaaacgggaatttcttcgcccgttaatgggtgaaccgctttaaagccagtatcgacgccttttttctccatcgtcgccatttcagcttcggcaactttggtgttacggcattcgtcaataaaggccgccagttcaggattattttccgccgctttctgcgccagcggatgacccgcagctaccgccaggtaggtacaacccataaaggtgtccgggcgggtagtgtaaacggtcagcgtgttgtcatagtcgttaacgttgaaggtgatctccacgccttcggaacgaccgatccagttacgctgcatggttttaacggtgtctggccagtgatccagtttatccagatcgttgagcagctcgtcagcgtaagcagtgattttgataaaccactgcgggatctctttacgttcaactttggtatcgcagcgccagcagcagccgtcgataacttgttcgttcgccagtacggtctggtcgttcgggcaccagttgaccgcagaagtcttcttatataccaggccttttttatacagctcggtgaagaatttctgttcccaacggtagtattccggcgtacaggttgccagctcgcggctccagtcataaccaaagcccagcattttgagctggtttttcatatacgcgatgttgtcgtacgtccacggtgccggagcggtgttgtttttcaccgccgcgccttccgcaggcagaccaaacgcgtcccagccgatcggctgcaggacgtttttgcccagcatacgctggtagcgggcgatcacgtcaccgatggtgtagttacgtacgtggcccatgtgtagtcgaccagaaggatagggaagcatagacaggcagtaatacttctctttgctctcgtcttcggttacttcaaatgtgcgcttctcatcccaatgaagctgtactttggattctatctcttccgggcggtattgctcttgcatggcagccagtggtcctgttttcaatacggctacaaatgtagcgttgaggtggtttttcagatccgcatagcatagcccaaacgtccgcgtcaaaacagcctttcgcgcactcgacgttgaaatgatgcccggattattcatacattaatttacagagtttgtgggcgtattagcaaagcaaggaacaaagaacgtctattattatagtcagttaacgacccgggagatgaaacgatgaacaaggttgctcaatattaccgtgaactggttgcgagtctgagcgaacgcctgcgcaatggcgaacgtgatatcgacgcactggtggaacaggcgcgcgagcgcgtaataaaaacaggggagttaacgcgaaccgaggtcgatgagctgacgcgagctgtcagacgtgacctggaagagttcgccatgagctatgaagagagcctgaaagaagaatctgacagcgtctttatgcgggtgattaaagaaagcttgtggcaggagctggcagacatcaccgataaaacgcagcttgaatggcgcgaagttttccaggacctcaatcatcatggggtttatcacagcggagaagtggtcgggctgggaaatctggtctgcgagaaatgtcacttccatctcccgatctacacaccggaagtgctgacgctatgcccgaaatgtggtcatgaccagttccagagacgcccgtttgagccgtaatagtctgatttcgcacagcaataaagagaatatgggccgaatgaaattccccggcccttgtttttatctttacagtaaatcttcagtctcacgaatttcctgactgacatctctggttccggaactctgaactttacgatacaggtcgagagcctgtcggagatcgacaggtcttccttctccgtagtgatacataatggccaggttataccaggcagtggcgtcattgcattcagcggctttcgtaaaccattcaaaggcagcctgataatctttctcaacgccttgtccgtgtttatacatataaccgatgttgacgtaagcgccgacgctcccctgagcggcagccttcagataccagtacatcgcttgcttatagtcctggtccaccccttcgccagcgttataatcccatgcaatttgaaactgggcgtgccgattaccctgctgtgcgcttttcaaataccagaatgcggcgagtgtcttgttttgagcaacgccttttccgtcttcataaagatcggccagattgttttgcgcgtcactatggccttgtaatgcagcttgtttgtaccagaaaaatgccagcgcatagtcttttgcgactccgttgccatttctgtacatccacccaagattattttgcgcataagacattccgctctccgcggctatctgataccagacaaccgcttctttataattgggggcttctccacgatccagtgtccagccaagggcgttggaagcgaaagtatggccttgtagggcagcttttttcagccagaagatggcttgctcattatctttatgacggcttttatcctcggtatacttttgccctaaggaatactgtgcttcacaatgaccttgctcagcggccagcttcagccagtaaaaggctttttcgtcgtccggagaatcaattgcgctatcgcgattataataaaacccaacaatatattgagcctcgcaatcgcctttttcagcacgttcgataatctcatctatacttaaattatcgcagcaactactcgtgaaaatcattatcatttccttatggttgcagataaaacatattatatttttatgtgttccatttttgcgtaagccttattttatgcgtattatgtcgcgtcagaaaagtataaataaacgagcctcgcaatgcggctaatattcatttaatgaatatttaaggataaattatatggacatggagagccaaaaaatattgtttgcactttccactccgatggaaatacgcaatgaatgctgtttacctagccatagtagtcccaaaatgtatttaggtacatgcttttttgacctttcttccagttggggaattgatgaccgtgatgacctgctgcgcacaattcaccgaatgatcgataacggtcatgccgctcggttggcagggttttatcaccgctggtttcgttatagcccatgtgaatggcgtgactatcttgctgaactaaatgagcaaggtcaggcttatgcgcaatttgtcgccagcaccgccgaatgctgtggcgaagggggaatcaaagcctgggattatgtccggatgggttttttaagccgaatgggcgtacttaataactggttgagcgaagaagaaagtctatggatccagagccgcattcatctacgggctctacgttattatagtaactggcggcaatactttgccggttatacctttggtcggcaatattggcagtctcccgaagatgatcatctgcctttattacgcgaattcttagcgcgtaaagaatacgacgattccggcaatgatatgttttatcaattatttgccagtgatgatgcgtattaccctaccttgtcctggcaaccattggcttactattctgcatgcccggaaacgcttaaggatatgagcgacctatgaaaaattgctggaagatcctcgatatagaggaaacgactgacgtcgatattatccgccgcgcttatctggcgctgttaccgtcctttcatccagaaaccgatccgcagggttttaaacaacttcgtcaggcgtatgaggaggcgctacggattgcgcagagccctgctaaatctgtttggcaaccagaagaatatgaggtagcagaacatgaaattctgctcgcctttcgtgcgttacttgcctctgatagtgaacgttttctgccctccgcctggcagcgattcattcagcaattaaattattgcagcatggaggagattgatgaattacgctggagcctgtgcacaatcgccatgaacactgcccatttatccttcgagtgcgtggtgttattagcagaaagattgcggtggttacaggaggaaaataccggggaaatagacgaagaagaactggaatcctttttatatgccattgcgaaggggaatgtttttaacttccagaccattctgcatctgcccgttgccgtgcaaaatgacaccatcgatttttaccaaatgttcgctcggatttggagtagccatccacaatggctgacattgtatttagcgcaacatcgcgcagtgattatccccgatgatgcaaaactgcacagaaatttactccgctggtatagcgcaggtcgcctggatatccccgaacttctggattacgcccagagttggcgggaaactgaacctgataatgaagatgcgccttattatgaatacgcgcaacgcgtctattgtggagaaggcgaaagcctgttggcagaactttgtgactactggcgcgagtatccctccacccaggcggatgctttaatgttgcaatggtgccgtcagcatcgggtcgattattacccattactggtgatgatgattgaagcgcgtgatctggttaacgatcagggaaaaccgctactttatgtccccggcgacagcgcccgtacgcgttttcatttatacgaaatactcagcgatgaaaaactctctgcgctggggcgtagtctggtcgagatggttttgcacaaaggacgtaagccgcggatcagtctcacgcgtgatacagaacataccttatggccattatatctagttgccaaacaattagtgcaggcctgccaacctacagaagaaagtttaatgccgattgtgagccgccttgatgcagaaaatcgttgtccactggaagcattaattattcgtcgattattaattcaggcggcgaattttaccgagaagcaaactgttgaaccggagccgcaaccgcagccaatgcccgttgacgatggtgggccaggctgtctgggcatcattaaaattattttctatatttttatctttgctggtttgatagggaaaatactccatctgttcgggtgacagtcgacgttaatgtgcgggaagcccggcaagtaatctttccgcatttttgtaatgttgtttggcggtcagttttaaccatttttgagattcataatggttaacattaataccactgccatttctgtagatcaaacctaaagtatattgagcatgagcatacccttgttcagctgcttccttataccagagaattgctttacgggtgtcgggtttgacccccagacctttgaggtagatccaccccagtttactttgcgcgcgtggattttcctgttccgcactttgctcataccagtatctcgcctgtgtataatccagtggtttaccgtcgctaccatgaagataaaattctccaaggcgatattggctcgtactgtgaccatgaatcgcggaaagctccgtggctgccgtggtgaatggaagactgcccggactgcttaaataatcaaaggcataattcaccatggctttatcacgcaacgtcgttttcttgggttggctaatacaggtaattgctgcaactataaaaattgcgaatatatacattaattttttattcatgtgtgaatgcttcgattttctttttattttgaaagcgtcaagtttatactcatcaataataaaaaagtagtcagttaatgcacttaagggattattaacaaatgaataaggaagaacaatatcttctttttgcgctttctgcgcccatggaaatacttaatcagggttgcaaacccgcgcatgacagcccaaaaatgtatactgggataaaagaattcgagctcagtagttcctggggaataaataatcgtgatgatttaattcagactatttatcagatgactgatgatggtcatgccaatgatttagctggcttatatctgacatggcatcgctcttcccctgaagagtggaaagcattaattgctggtggcagcgagagagggttgatttatacccaattcgttgcccaaaccgctatgtgctgtggggaagggggaatcaaagcctgggattatgttcgaatggggtttctgagtcgggtcggtgtgctcaacaagtggctgacggaagaagagagtttatggctgcaaagccgcgtctatgtacgagctcaccattactatcacagctggatgcactatttttccgcctatagcttaggacgtctctactggcaatcttctcagtgcgaagacaacactagcctacgcgaggcgctaaccctgtacaaatacgatagcgccgggagtcgtatgttcgaagagctggcagcgggaagcgatcgtttctatgccacgcttccctggcagccattaactgtccagtctgaatgcccggtaacgcttaaggatgtgagcgacctatgaaaacatgttggcaaatcctcgaaattgaaagcacgacgcaaatagacattatccgccaggcttatcttgctcgcttaccgttgtgtcatcccgaaaccgatccgcaagggtttaaagcattacgccaggcctatgaagaggccctgcgactggcggtaaatcctgtcgaggaagcagatgatgaagaaaaagatgctgccgctgaacatgaaatactacgtgcattcaggacattactggatagtgaaagtgatcgttttcagccttccgcctggcagaaatttattcagcaattaaatacctggaacatggaggatgtcgatcaattacgctggccgctgtgtgcaatcgccatagaagcgcgatatcttagtttaaattgtgcttctttgctggcagagcgtttgaactggcatagttttaatgacagcgaaggaatggatgaggaagaaagggaggcttttcttgaggccattcaggctggtgattgtttcgatttccttagccttctggaatatcccattgcgttgcagaaccagactgttgagtattacttcgcgctggaacgttgctgccgttaccatcctgactatgtcactgcgtttttggcgatggaaggtccgtggttaattcctgatgatgcaaagttacatcgcaaactgttgcgctggtacagcagcgtgcaaacaggtatggcggaactcattcctgtcgctcaacagtggcaaacggaagaaccagaaagcgaagatgcccggtattacttgtgtgcacaacgtttgtactgcggcgagggggaaagcctgcttgccgatctctgcgcgtactgggaaagttacccatctacacaagctgataatttgttgttgcagtggagcaagcgtcattgcccggattatttcgcgttattagtgatggttatcgaagcgcggagcatggtagatgcgcaaggtcaaccgctgaaatatgttcctggtgagagcgcccggacgcggctgttatgggcggagattttacatagcggaaaattaagcccgttaggtcaaagctttattgagagcttattcttcaagcgcaaagcatgggcgtggtggaaaagcagagtcggtagcgagacagagcaagatagtccgttcctggatttgtatcgggtagcggaacaggtagtacttgaagcgtttccgaaacaagagatgctggcccgtcttaatacaaggctggaaggcggagatgctcatccattagaggccattgtcacccggatgcttttgacgaaagtgaaactcgagccggaggatgaagatgtcgatgagccaacacctgaaaatcatgaagaaaaaaatgatgagggtgaaaaaccacagagcattaccagcattatcaaaatcagtttaacggtgctggtgataggttatgctctcggcaaaatcgcgatgttgtttagctgacgatgtgttttttgcgccgatgccggatgcagcgtttacgccgcatccggcagccgtgtttatgggatctcaatggctaaataatcgctcgcccgccgccgaacttcatccacgcgggccatatcgttactctgcaacgccgcatcaaaatcggtgatcacccggccgatctcttctcgctcgtcacccagcgcccgcgcccacaactcttccagtttggctttaaaggtgcgattgatgagcatatcgcgcggataaattttcaatgcggataaccgcgtccgactctcttcaatctgctgcgcgctcaatgttaccgggctgtggttaatcactctggacttaacgctgccgtcttccagaagcacgtcaacttcaagcaacccgttgatatcataactaaagcgaatatcaatgctctgataagccccggttttcttcaacggcacatcgaaggattccaccagaatgttgtttttaactttgtggttttctccctgatagacgttaaccgtaatactatcctgttccgggtgcatggtactataagtttctacacggctcacgggcacagtggtgtttcgttcaataatcgggctgaaaatgccggaaacgccctggcggttaacttcaacgcccaagctgtaagggcaaatatcagtgaggattacctcttcaatatcttcactgcgtaagcggcaggcggcctggattgctgcgcccagcgcgacaatggtgctcggatcgtaactttgatacggtaatttgccaaacagacgcacggcgattcgctgcaccagcggcatttgactcgcgccgccaaccagcaccagactgtcgatttgactcggcttcagacgcgcatcgcgcaacgcctgttcaatcggcactcgcaagcgattgagcagcggcaaccacaaatcttccagttcgttctcgtaaaattcgcattcccgcgtttcttcctgatactgccagcgaatgtgcaatgggctttgattgctacattttgccgcttccacacaggcgtacaaggctgccagttcactctcgttaagcgtggtcctggcgacatccgcgcgttttaaaacctcatcgaccagcatatgggtaaaatcttcgccaccaagaaagttgtcgccagcggaggcgtgaacttcaatcaccggcgtggcgtactcaagcaccgtaacgtcaaacgtgccgccaccgagatcaaacaccaggctacgggtattttgttgggtatgcaggccatacgccatcgcagctgctgtgggttcattaattaagcgtaccgcatttaacccggctaactccgctgctaaacgggtatgcttgcgttgttcatcgctgaaataagccggaacggagatcaccacatctttaatcggacgttgcagaaattcttcggcatcttcttttaaactgcgtaataccaaagaggacagttctggcgcgttaaatgtgtcgctgcctaaccgccagttggtattactgcccattgcacgtttaaataacgctgccgttttatccggatggctagtacgccgacttacagccggttttccgactaaaatatgattattttcatccatgctaattatggatggtgttaaatattcaccgaacttatttggaattaattgcgcggcaccgtctttccagacggcaattaaactattggtagtaccgagatcgataccaatggcgagttctgcattatccattgcatttatatcttgaaagaaaaagagataaacagattaagaccacccaggtaacgcgtggtgatcttaatcaatgacgtgtgttaagcgtaaaatttcagacgatcagccagtaaatcaacaaagccctgacgatcaacatcgaccattacggtggcattcggtttattgcctgtcagataataataatcaacaaccgtcataccctgggtatatttcccctgtgtttccacgccaacccagcgctcaacagaggtaaataactccggtttcaacagccaggcgatggtgcatgggtcatgcagtggtgcgccgacaaagccccatttttcgtctttatgatattcgaggaagaaatccagcagttcggcaacaatggtactaacagggttaccaatcgcgcggaaacgctcggtgtcttcaacgtggatttgtgctttatgagtaacatccagaccggccatcaccaccgggatcccactctggaagacaatttctgccgcttccgggtcaacgtaaatattaaattcagccgcaggcgtccagttacccagccccatagcgccacccataatcacgatacgggcaattttgctatgcagttccggatggctattgagcagcaaggcaacgttagtttgcggtccggtagacacaatggtgacaggttccgcactttcacgcagcgttttcgccatcagctctaccgccgtacagttttgcggtgcgaatgtcggttccggtaatgccgggccgtcgagaccgctttcgccgtgcacattgtccgcgataatcaactcacgcattaacggttttaccgcgccgcctgctaccggaatatcggtgcgattaagcaaggtcagcatacgcagaacattgcgtaaggttttttctggtgtctggtttccggcggaagacgtaattgctttgacatcaagctctggactggcgagggcgagaactattgcgatagcgtcgtcatgacctgggtcgcaatctaacagaattggcagtgccattgttgctccttgttgtgtgcttctttgcgacaagggtaacgccaggatgtaacagatacgaggggcgaaacgataaagcgtgagatggcgcgcaattgggtatgcgcgccagagtgattaatgcaggattttcgcgaggaagtcttttgcgcggtcgcttttcggatcatcgaagaaagcgtctttcgggctgtcttcgacaattttaccctcgtccataaagatcacccgattcgccactttacgggcaaagcccatttcgtgggtcaccaccatcatggtcattccttcgttcgccagttccaccatcacgtccagtacttcgttgatcatctccggatccagcgcgcttgtcggttcgtcaaacagcatcgcaataggatccatacacaacgcgcgagcgattgccacacgctgctgctgaccgccggaaagctgcgccggaaacttattggcgtgagcagaaagcccgacacgctccagcagtttcagggctttttcacgagccggcgctttatcgcgtttaagcactttcacctgcgccagggtcaggttttcgataatgctcagatgagggaacagctcgaaatgctggaataccatcccgacgcgggaacgcagctttgccagatcggttttcttgtcgttaaccacgataccatcgacggtgatttcaccttgctgcaccggttcgaggccgttgacggttttaatcagcgtacttttgccggaaccagacgggccgcaaaccaccaccacttcgccttttttcacttcggtactgcagtcggtcagcacctgaaagtgaccataccatttactaacatttttcagggtaatcattatgctgtccttcttttcaagtagctgaccaacaagctcgcgctaagactaataacgaaataaacaaatccggcaaacaggatcatctcaacctgcgtaccatcacgctcaccaatggtactggcggtacggaagaaatcggccagggataacacatacaccagactggtatcctggaacagtacgatgccctgagtgagcagcagcggcaccatcgcgcggaacgcctgcggcagaataatcagtttcatgctctgccagtgagtcattcccaacgccagcgcggcgctgctttgaccacgagaaatactttgaataccagcacggataatctcactatagtaggccgcttcaaacatgctaaacgccaccatcgcgctaattaaacggatatcattttttgggcttaatcccagcacgttttgcagaaaacccggcacgatcaggtaaaaccacagcaaaaccataactaaaggaatgctgcggaatacgttaacgtaggctttggcaaaccacgccacgggcgcaaagctggataaacgcatcaccgccagcatcgtgccccacaaaataccaatcactaccgccgtgacggtgattttcagggtgatcaccagcccgtcgagcagatatggcagggaagggacaatggaactccagtcaaactcgtacattatttgccccccatgttgccaggcaggcgaactttacgttcaaccagcgtcatcaccagcatgataaaagcgttaatcaacacatacgccagcgtaatggcggtaaagctctcccaggcatgggcactgtaatcgagcaatttacccgcctgcgccgccatatccaccagaccgatagtgctggcgatggcggagtttttcaccaggttcatcatctcactggtcatcggcgggacgataacgcgataagcattaggcagcagtacgtatcgataagcctgcggtagcgtcaggcccatcgccagcgcggcatttttttgccctcgcggcaggctctgaatcgcggcgcgtacctgttcgcaaacacgggcggcggtaaacagccccaggcagagcatggaactaaggaaaaactgaatattgggatccagctcggccttaaaccacatgccgattttctccggcagcagctccgggatcaccagataccaggtaaagaattgcacaatcaacggcacgttgcggaacagttcgacatacaacgtacccagaccagagagaaaacggtttggaacggtacgtaaaatgccgaaaaaactaccgacgaggaaagcgataatccaggcgcagatgctcaaagcgatcgtcacctgaaaaccactccagatccaaccaagataggtggtgttgccgaacggggcttgttgtaaaaaaataccccagttccagtctatagacataaatctactccagaaaaaagagggtagcagcgttaactgctaccctcgaagattgttacccagcgtattgcggttttcaggcccgatggggaacgaccatcaggcgtatagtctgtccgtgctacgtaacaatcgagagggctggaatttccgcccctggttcttgtaattagttcagtgccttgtcattcggttctttgaacagtgctttcatttcgtcactcagttcgaaattcatgttcaggtttttcggcggaattggatttttgaaccacttatcaaaccatttttccgcttcaccggaggtctgcacctgagcgatggtgtcatccatcagctttttgaactgcggatcatctttacgcaacatacaaccgtaggcctcctgagactgcggcttgccgacgatttcccagttgtctggtttcttcgctttcgcacgttcaccggccagcagagcgtcatccatcataaaggcaacggcacgaccgctttccagggtgcggaaagagtcaccgtgatctttggcgctgatgatgcgcatattcattttttgctcttcattcagtttgttgagcaaaacttcagaggtagtgccggaagtgacgactacggctttgtctttcaggttggcaaaatctttgatatcgccaccctttttggtcaacaggcgcgtaccgaccacgaaaatagtgtcagagaaagccgcctgtttttggcgttcgacgttgttggtggtagaaccacattcaaaatcgaaagtgccgttttgcagcagtggaatacggttttgactggtaatcggaatcagttttacctgcaagtccggtttgttgagtttctttttcactgcttcaacaatggcgttggagtaatcctggctgtaacccaccactttttgctgattgtcgtaataagagaaaggcacactagattcacggtgaccgacgacaatcacaccgtttttggcgattttgtccagagtactgcccgctgccggggcggcgtcatctgcctgtgccagtcctgcggaaagcgccagggcgaggattgctgtggcaggtttacgtaattgcatatccaactcctttatcttctgcgttaagaacgcatggatacccgttgtgagtgtttgtgttgttatcgtctgcaactttattgtgcagtgttgtgcctgttagggaaggtgccttaggtaacatttagtttggctaaatgtaaagatattgctgttttattgtttgtttttgcgagatgcgccgcaccattccgaagcaaaattcttaaaatgcactcttttagtgctaccgctggattactgtggtgcaactaggttgtactgatgctgtttcagggtttgccttgtataacaaagcaatagatgtgccaaagttggataggagaatattgttatccggataatgcactgatgccgcatccggtgagcgtgccgaaatatgggatgtattccggcacgataagaagggattatttacgtcgctgacgcagactcatcaacacagcagcaaaaccaaacaatgccgtcagcacccacagcggccagttgccggtacgtgcgtatggtgtgagtccggtggtcggcgtcacgttagtggttaacacctcgcgggtgaactgcgggatcatcgcctgaatctcaccctgcgggccaatcaccgccgtaatgccgttgttggtgctgcgcaacagtgggcgcgccagctccagcgcacgcattcgcgccatctggaagtgttgccatggaccaatagatttaccaaaccacgcatcgttggagatagtcagcagatagtcggtatccgggcggaagttatcgcgcacttgctcgccgagaatgatctcgtagcaaatagccgcagtaagctcaataccatttgcgctcagcggcggctggatatatggcccacggctgaagctgctcatcggcagatcaaagaacggtgctaacggacgcagaatgctctccagcgggacaaactcgccaaacggcaccagatggtttttgttatagcgatcggcactttcgtagctgtacggcgcacctttacccagcgtgatgatggtgttgtaggtatcgtagcggttctgcttattgagacgcgcgtcgacaatcccggttaccaggctgctacctttatcacgcaactcaccgtccagtgctttgaggaacggttgctgattaatttccagatcggttatcgcgctctccggccagataatcaagctacttttgcccatcagcggtgccgttgcgttgtagtaaatcttcagcgtattaagaagctggccttcgtcccatttcaggctttgcggaatatcgccctgaaccatgctaacctgaatggttttctccggttgtggggtaaaccactggatgtaacgcagcgggaagggaagggcaaacagcacgacggccaccaccagcggacgccagttgcgtttgaccaacgccagtgccagcaggccactaaccatcatcagcaggaagttaatggcttccacgcccattatcggtgccagcccttttaacgggccatcaatctggctatagccgaactgtaaccacgggaagccggtcagtacccaaccgcgcagaaactcggtcacttgccagagggcaggggcggcaatcgctacgcgcagccaggtggttttcggccacagacggctcagcacgccagcaaacagtccggtatacaggctcaaatacgccgccagcagcaccaccaggaagatgttaaccgggccaggcattccgccaaaggtcgcgatgctgacatagacccagttaataccgctgccaaagaggccaaatccccagcaaaagccaatagcggcagactggagtggacggcggttaaaggtcaacgcctgaagccccatcaggctaataatcgccgcaggccagacgtcgtaaggagagaaggccagcgttccgcaggcaccgaataataacgccagcagcaggcgaatgcgctggcgttcaattaaactggcaaaagccatgtagttatctatccagtttcggttttattcatccagcttcggctggggactgtcatccgggattttgacatgaacctgaataatacgccgactgtcggccatcgccactttgaactggtaaccgtcgatgtcgatagtttcgccacgcgccggaagatgcccaaatgcctgcatcaccagaccaccgatagtgtcgacttcttcatcgctaaagtgggtgccgaacgcttcgttgaagtcttcaatggaagccagtgcgcgtacggtccaggtatgacgactcagctgacggaagtcgatatcatcttcttcgtcatactcgtcttcaatctcaccaacaatcagttccaggatgtcttcaatggtcaccagaccggaaaccccaccgaattcgtcaataacgatcgccatgtggtaacgctgagagcgaaactctttcagcatccggtctacgcgcttactttcaggaacgacaaccgcctgacgtaacactttgtccatgctgaaggcttcagcatcgctgcgcataaacggcagcaagtctttcgccatcagaatcccttcaatgtgatctttgtcttcgctaatcaccgggaaacgactgtgggcggactcgatgatgacatcaagacattcgtccagcgtctggttgcgtttcagggtaatcatctgggagcgggggatcatgatgtcgcgaacgcgttggtctgcgatgtccatcaccccttcgagcatatcgcgcgtatcttcgtcgataaggtcgttctgcccggaatcacggatcagcgccagcagttcgtcacggtttttcggttcaccgtggaaaagttggctgagtaacagggagaaaaatcccttcttgttgcttatcgtgtcactactgtgactattgtcgtcgctcatggcgtcgtatgggttctcatgttagttaatcaaaacgccgtcgttaatcaccaacggcggggacgtctgccagtcaaatgcctggcaaattattctttctcggcaatgtacggatcctcatagcccagagcaagcataatctctgtttcgagggcttccatttcttctgcttcgtcatcttcgatgtgatcgtaacctaacaaatgcagactgccgtgcaccaccatatgcgcccagtgcgcctccagtggtttgccttgctcctgagcttccttctcaaccacctgacggcagataaccagatcgcccagtaggctcatttccatgccaggcggcacttcaaacgggaaggagagcacgttggtcggcttatccttaccgcgataggtcagattcagactgtggctttcggcggtatcgaccacgcgaatcgtcacttcgctttcttcctgaaactgcgggatcaccgcattcagccatgtctgaaactggctctcttccggtaacccggaattatcttcacatgccagttgtaaatcgaggatcacctgactcatttttgttcctgttcttcgcgcttgcgttctgctgccagcgccgcttttcgtttttgttcggcttcttcccaggcttcataggcgttaacgatacgcgccaccacagggtgacgaaccacgtcttcgctgtggaagaagttaaagctgatctcttcgacatcggccagcacttcgatggcgtgacgtaagccacttttagtattacgcggcaggtcgatctgtgtgacgtcgccggtgataaccgctttactgttaaaaccgatacgggtcaggaacatcttcatctgttcgatggtggtgttctggctctcatcgagaatgataaacgcgtcgttcagcgtacgaccacgcatataggccagcggtgcgacttcaataacgttgcgctcaatcagtttctcgactttctcaaagcccagcatttcaaacagcgcgtcgtacagcgggcgcagatacgggtctactttctggcttaaatcgccaggcaggaagcccagtttctcaccggcttctactgccggacgagtcagcagaatacggcgaatttcctgacgctccagggcatcaactgccgcagccactgccaggtaggttttacccgtacccgccgggccaacgccgaaggtaatgtcatggtcgagaatattggcgatgtactgcgcctggtttggcgtgcgcggcttaattacgccgcgtttggttttgatattgaccgctttgccgtactccggcacgctctccgcgctttgctccagtacccgcgcttctttaatcgcaaggtggatctgttccggttcgatatcctgaatctgaccgcgcatcggggcagtatcgacatacaggctacgcagaatgtctgccgcagcggtgacgcaaatcggacggccggtcagtttaaagtggttatcgcggcgattgatctcgatgccgagacggcgttcgagctgcttgatgttgtcatcaaacgggccgcacaggctcaacagacgcgcattgtctgctggctccagggtgatttcgcgagtgtctatgttcaaaccgttcctcttatctgtatgccgccggaagctgaacattcaccggcctataaggaaattattcacgccacaggaaaaaggcgcaagcattgcaataaagatggggataaagagagaaaaaacaaggcccaccggaacggcaggcctgagaattacggctgataataacccacgccaaggtcgttttctttgcgggtacgggcaatcacactttccggtgtttctgccacgcgcagacccatttcatcttcagtacgcaccactttaccgcgcagagagttcgggtagacgtcggtaatttctacatcgacgaatttaccgatcatatccggcgtgccttcgaagttgaccacgcggttattttccgtacgcccggaaagctccatgatgctcttacggcttgtaccttctaccagaatacgctgggtggtgccgagcatccggcggctccacgccatcgcttgctgattaatgcgctcttgcagaatatacagacgctgcttcttctcttcttccggaacatcatcaaccatatcggcggctggtgtacccggacgtgcagagaagataaagctgtagctcatgtcgaaattgacgtcggcaatcagcttcatcgttttctcgaagtcttcggtggtttcgccagggaagccaacgatgaaatcagaactgatctgaatatctggacgcgccgcacgcagtttacggatgatcgctttgtactccagcgccgtatgggtacggcccatcaggttcagaatgcgatcggaaccgctctgtaccggcagatgcaggaagctcaccagctccggcgtgtcgcgatacacttcgatgatatcgtcggtgaattcgatcggatggctggtggtaaagcgaatacgatcgatcccgtcgatcgcagcaaccagacgcagcagatcggcaaagcttccggtggtgccgtcgtagttttcaccacgccaggcgttcacgttctgaccgagcaggttgacttcacgcacgccctgagccgcaagctgggcaatctcaaacagaatatcgtcggacggacggcttacctcttcaccacgggtgtaaggcaccacgcagtaggtgcaatatttattgcagccttccatgatggagacaaacgcggtcggcccttcggcgcgcggttccggtagacggtcaaacttctcgatttccgggaagctgatatctacaaccgggctgcggtcgccacgcacggagttgatcatctccggcagacggtgcagcgtttgcggcccaaaaataatatcgacatagtgggcgcgctggcgaatgtgctcgccttcttggcttgccacgcagccaccgacgccgataatcaggtctggattcttctcttttaacagtttccagcgacccaactgatggaagactttttcctgagccttctcgcggatactgcaggtgttcagcagcagcacatccgcttcttccgccacgtcggtcagttgatagccgtgggtggcatccagcagatcggccatcttgctactatcgtactcgttcatctgacagccccaggttttaatatggagttttttggtcatcgacttgctcttgcgaaatagtagccaggaatgcagggcgcatagtgtaatgctttgctgccgttgtgaccagtatgagcgttatcagcccttaggggtaaaaatcctgtaaacttaaagcatattgctaacaggatgattgaccatgacaaatcaaccaacggaaattgccattgtcggcggaggaatggtcggcggcgcactggcgctggggctggcacagcacggatttgcggtaacggtgatcgagcacgcagaaccagcgccgtttgtcgctgatagccaaccggacgtgcggatcagcgcgatcagcgcggctagcgtaagtttgcttaaagggttaggggtctgggatgcagtacaggctatgcgttgccatccttaccgcagactggaaacgtgggagtgggaaacggcgcatgtggtgtttgacgccgctgaacttaagctaccgctgcttggctatatggtggaaaacactgtcctgcaacaggcgttgtggcaggcgctggaagcgcatccgaaagtaacgttacgtgtgccaggcagcctgattgcgctgcatcgccatgatgatcttcaggagctggagctgaaaggcggtgaagtgattcgcgcgaagctggtgattggtgccgacggcgcaaatagccaggtgcggcagatggcgggaattggcgttcatgcatggcagtatgcgcagagctgcatgttgattagcgtccagtgcgagaacgatcccggcgacagcacctggcagcaatttactccggacggaccgcgtgcgtttctgccgttgtttgataactgggcaagcctggtgtggtatgactctccggcgcgtattcgccagttgcagaatatgaatatggcacagctccaggcggaaatcgcgaagcatttcccgagccgtctgggttacgttacaccgcttgccgctggtgcgtttccgctgacgcgtcgccatgcgttgcagtacgtgcagccagggcttgcgctggtgggcgatgccgcgcataccatccatccgctggcggggcagggagtgaatcttggttatcgtgatgtcgatgccctgattgatgttctggtcaacgcccgcagctacggcgaagcgtgggccagttatcctgtcctcaagcgttaccagatgcggcgcatggcggataacttcattatgcaaagcggtatggatctgttttatgccggattcagcaataatctgccaccactgcgttttatgcgtaatctcgggttaatggcggcggagcgtgctggcgtgttgaaacgtcaggcgctgaaatatgcgttagggttgtaaccttacaacattgccggatgcgtgccaaccgtaggtcggataagacgcggcagcgtcgcatccgacattgaaggataagacgtgtcaacatcgcattcgacattgaatgaacgcagaaaagcaaaaagctcgccgaagcgagcttttttaatgtggctggggtacgaggattcgaacctcggaatgccggaatcagaatccggtgccttaccgcttggcgataccccaactgggtgcacttacaaggtaagcgtcttgaataaattggctggggtacgaggattcgaacctcggaatgccggaatcagaatccggtgccttaccgcttggcgataccccaacaaattggttttgaatttgccgaacatattcgatacattcagaatttggtggctacgacgggattcgaacctgtgaccccatcattatgagtgatgtgctctaaccaactgagctacgtagccagattgtttcttcgatggctggggtacctggattcgaaccagggaatgccggtatcaaaaaccggtgccttaccgcttggcgataccccaataaccgggcggtgaaccgcttactcgaagaagatggctggggtacctggattcgaaccagggaatgccggtatcaaaaaccggtgccttaccgcttggcgataccccatccgtacaacgctttctggtgaatggtgcgggaggcgagacttgaactcgcacaccttgcggcgccagaacctaaatctggtgcgtctaccaatttcgccactcccgcaaaaaaagatggtggctacgacgggattcgaacctgtgaccccatcattatgagtgatgtgctctaaccaactgagctacgtagccatcttttttttcgcgataccttatcggcgttgcggggcgcattatgcgtatagagccttgcagcgtcaacctctttttcaaggaaaattgctcgaaagtgactgtttggttaggttgcgaacagcgtggcgctatattcgtcaattattgtttactttgtgttttttcccaccctacagccattcttttgtcatacaggatgaaattcggaatttaacaatagtggtgggaaattaatctatgaaatactggcctacagtgatgagttgtcaaacagtgatgtggcaaacccggaacatttccttactgcatatcagaatcaacaagcacctcaataactgaaacagccccggatttcaccggggctgtttcgcatttcttacttatacgcgctctggtgaacaccaaccgcgcgaccagacggatcgtccattttcttgaacgcttcatcccattcgatcgctttagcggaagaacaagcgacggaaggaccgcccggcacgcactcagcggcgctcggaagcgggaatagttcttcaaagatctcccgatacaagtacgcttctttagaggttggcgtgttgtacgggaagcggaagcgggcagtttccagttgctgatcagaaacctgctgcgcagccacttctttcagggtgtcgatccaactgtaaccgacgccatcggagaactgctctttctgccgccaggccacgcttgcaggcagatacgcttcaaaacattcacgcaggatgtgtttttccattttgccgttaccgcacattttatcctgtgggttaatacgcatcgccacatcaaggaattttttgtcgaggaacggaacgcgtgcttccacgccccaggcactcatcgctttgttggcacgcgcgcagtcatacatatgcagggccagcagtttacgcaccgtctcttcatgcagttctttggcattcggtgctttgtggaagtaaagataaccgccgaacacttcatcagaaccttcaccggacagcaccattttaatgcccatcgccttgatcttacggctcattaaatacatcggtgtactagcgcgaatagtggtcacatcataagtttcgatgtggtaaatcacgtcgcggatggcatccagaccttcctgtacagtgaagtgaatttcgtgatgcaccgtgcccagatggtttgccacttcctgggctgctttcagatccggactacccggcagacctacagcaaaggagtgtaactgcggccaccaggcttcagagcgttcctgatcttccacgcgacgggctgcgtatttcttggtgatagcggaaataatactggaatccagaccaccagaaagcagcacaccgtaaggcacatcagacatcagatggcttttaacactatcttccagtgcctgacgcagctcgtttttgtcggtcacgttatctttcaccgcatcgtagtcgaaccagtcgcgatgatagtaagaacggatttcgccgtcctggctccacaaatagctccccgccgggaactctttaatcgtgcggcaaactggcaccagcgctttcatttcactggccacatacagctgaccgtgttcgtcataccccatatacagtgggatgatccccagatggtcgcgaccaatcaggtaggcatctttttcgctgtcgtacagtgcaaaggcaaacatgccctgcaagtcgtcgagaaattccggccctttttcctgatacagcgcgaggatcacttcacagtcagacccggtctggaactggtaacgatcgccatattcggcgcgcaatgcctggtggttgtagatttcaccgtttaccgccagtacgtgggttttttgttggttgtagagaggttgcgcccccgcgttaacgtcaacaatactcagacgttcgtgggcgagaatggcgttatcgctggcataaataccggaccagtccgggccacgatgacgcatcaggcgactcagctcgagggctttcttacgcagctcaactgcgtctgttttgatatcgaatacgccaaaaatactacacataaccttctccgttaacctggtatttgttgcttgttgtgtttgcttgtttaaaaaaatgccgcaaagcagcactgtgcgcaagcgatttggcggtgaaaaaataaaaaacgtaatggtgattgtcgattggtgaaaaaaggtctggtgtgaggatatatttattgatgaatcgataatttttagcgggttttattgaatgtttatattttacgggggccaaattgctgacaaagtgcgatttgttcatgccggatgcggcgtgaacgccttatccggcctacaaaagcatgaaaattcaatatattgcaggagctgcgtaggcctgataagcgtagcgcatcaggcagtttggcgtttgtcatcagagccaaccacgtccgcagacgtggttgctattcagataacgtcgatttcagcgacactcgggtaaatccagctggggcggaaaggcatactgtcgatatcgtcgaggctgctaacaccagaaagcaccagaatcgtctccagacctgcctggaagccggccagaatatcggtacgcaggttatcgccgacaatcaccgtttcttcgctatgcgcctgcattttgtttaatgctgcgcggatgatccacgggctgggcttaccaacatagaacggtttgcgcccggagattttctcaatccctgcacacaacgcgccacaagcgggataaaaaccgcgcccgtgggtgtccggattggtggcgataaaacgtgcaccgttagcgacgaaataggctgctttatgcatcatgtcccagttgtaggaacgcgtttcgccaacaatcacgaaatcagggttcacatcggtaatagtgaaaccggctttgtacagttcatgaatcagtgcgccttcgcccaccacatacgctttcttgccttcctggcgacgcaggaaatcggcagtcgccatcgcagaggtataaaacacgctgtcaggtacatcgacacctgcggtggcaaagcggttcgccagatcttgcccagtctggctaggatagttggtcagcaacaccagcggcaggcctttatccataatcccgtgcaaaaattccgctgcacccggtacggcgacgttatcgtgcatcagcacgccgtcgatatcgcaaattacatttttaatggtcatggactacccagaatattgacaacaataagcgccactataaaagcacattaattttccagcaaatgctggagcaaaataccgttgagcatggcgcgttttaccagcgcaaaagcgccgattgcgctgcggtgatccagctcagaacgtaccaccggcagattagtgcgaaacgccttcagcgcctgggtattaatgcagctttcaatagcagggagcagcactttatcggcttcggtgatttcaccggcaataacaattttttgcggattaaataagttgatagcaatggcgatggttttacccagatgacgaccgacatactcaattacttcgctcgccagactatcgcctttgttcgcggctttgcagatagttttgatggtgcagtcgtccagcggcacgcggctctggtagccctgctttaacagattcaacacccgttgttcaatggcagcgttggcagcgatagtttccaggcagccaaagttgccgcagtggcagcgttcacccagcggttcgacctgaatatggccaatttcaccgacgttgccgttgcggccaataaaaatgcgcccgttagagataatcccggccccggttccgcgatggacacgcaccagaatggagtcttcgcaatcctgacttgcaccgaagtagtgctccgccagcgccagactacggatatcgtgaccaacgaaacaggtcactttaaaacgttcttccagagcttctaccagcccccagttttctacctgaatatgcggcatgtaatgaattttgccgctgtccgggtcaacaagccctggcaggatcacgctaatcgcgatcagctcgcgcagtttgcgctggtagctatcaataaactgagcaatggcattcaacagggcatgttccagcgtttgctgggtacgttccggcagcgggtaatgttcttctgccagcactttgctgctgagatcaaacagagtgatggtggcgtcatgacgaccaagccgtacgccgattgcgtggaaattgcgggtttcggtgacgatggagatagcgcggcggcccccggtggaggcctgctgatcaacttctttgatcagcccgcgttcgataagctgacgcgtaattttggttacgctggcgggggcaagctggctttgctcggcaatctgaatccggctgattggcccgtactggtcaatcaggcgataaaccgccgcgctgttaagctgttttacgagatcaacattacctatctgagcttgtccgcctggtgtcatactttctcttattgagttacgacctcgttaccgttaacgatggtcttggtgattttaaaatcaggtgtgaatgcagtcaggttggctactttacctgcggcgagtgtgccgagacgtttctcaacgccaatcgcacgcgccggatagagcgtcgccatacgtagcacttcatccagtgcgataccgcaatgttcgaccagattacgcacgccttcaatcatggttaaggaactaccgcttaacgtaccgttctcatccacacaaagtccgttacggtagtatattgttttacccgcaaaaatgaactgttcaatgttggcacctgctggcgcggtggcgtcagtaaccagacacagtttgtcgcctttcagacgtttagcgttgcgaatgttggcgtaatcaacatgcaggccatcagcaataataccgcaataaatgtcagcttcgtcgaggatcgcgcccgccaggccaggttcacgaccggtaatatacggcatcgcgttgtacagatgggtggcaaaggtaatccccgcgcggaaaccggcttttgcttctttcaacgtcgcgttggagtgaccggcagaaaccacaatcccggcatttgccagtttgctgatgacttccgcaggaaccatttccggtgccagggtcactttggtaatgacgtcggcgttttcacacaggaaatcgaccagcgcggcatcaggcttacgcacaaaattcggattatgggtgcctttttttaccagattcagccacggaccttccagatgcagacctaacgcctgattcggatgttttgccaggtactcgcgcataacgcgcacgccctgtttcatcagctcatcgctggtggtgataagcgtcggcagatagttagtacagccacttttctcattggctttctgcatgatttccagcgtttccacgctgaccgcttcagcggtgtcgttaaactgtacgccgccgcagccgtttaactgcacatcgataaaaccgggggagagaatggccccgttcagactacgttgttcgatctctggcggcagttccgctaccggacagacgcttttaatcaggccatcagcgataacaaccgcgtggtcatcaagaaattcgtggccggtaaagatccggccctgggttaatgcatacattctgacccccgattttaaaaaatattgccctgagcaaggagccagggcagggataacaattacagacctttgatattttctgcttctaattcattgaaatatcttaaagtcttaactttcagctccatggtggaaggttcatcgcacaccatgatcgctttcggatgcagttgcagacagctgatggtccacatatggttcacgcaaccttcaacggcggcctgcagcgccagtgctttctggctacccagcaccagaatcatcacttcttcggcatccagcagtgtaccaacaccgacagtcagggcatattttggcacctgattaacatcgttatcaaagaaacgagagtttgcgacgcgagtgtcatgagtcagggttttgatacgagtacgagaagccagagaagacgccggttcgttaaatgcaatatgaccgtcgttacctacaccgcccataaacagatgaatttttccgtaagaacggattttttcttcatactggcggcactcggcgtcgatatccggggcgttgccgttgagaaggttgatgttttctgctggaatatcaacgtgatcgaagaaattacggtgcataaagctgtagtagctttccggatgctctttcggcagaccgacatattcgtccatgttgaaggtgacaacgtgcttaaagctgacctggcctgctttatgcatttcgactaacgctttataggtggtcatcggcgtgccgccagtcggcaggcccagtacaaacggacgatcggcagtcggtttgaacgcattgatacgattgacgatatggcgagcagcccatttgccgacctgttcagcggtagtcagggggatcagtctcattattcacctcaataagtaaaatgtaagccgttggcggattaggcatctttaagcgtaacctggatttgcgcagacaggcgtcaatccgacctgattttttgaatgataaaataagttttctggtttagccagtaaaagggagtgataataacgatatttggtgacaaaactcacaaaagacacgcgtttaatttgcgatacgaattaaattttcacacactctgtagcagatgatctaacaatctgattacagaacatcggcagtacaatttgcagcaaaataaaaatacggcttgaaacgagccaaatagggttctcgtagggggaataagatgaatattttaggttttttccagcgactcggtagggcgttacagctccctatcgcggtgctgccggtggcggcactgttgctgcgattcggtcagccagatttacttaacgttgcgtttattgcccaggcgggcggtgcgatttttgataacctcgcattaatcttcgccatcggtgtggcatccagctggagcaaagacagcgctggtgcggcggcgctggcgggtgcggtaggttactttgtgttaaccaaagcgatggtgaccatcaacccagaaattaacatgggtgtactggcgggtatcattaccggtctggttggtggcgcagcctataaccgttggtccgatattaaactgccggacttcctgagcttcttcggcggcaaacgctttgtgccgattgccaccggattcttctgcctggtgctggcggccatttttggttacgtctggccgccggtacagcacgctatccatgcaggcggcgagtggatcgtttctgcgggcgcgctgggttccggtatctttggtttcatcaaccgtctgctgatcccaaccggtctgcatcaggtactgaacaccatcgcctggttccagattggtgaattcaccaacgcggcgggtacggttttccacggtgacattaaccgcttctatgccggtgacggcaccgcggggatgttcatgtccggcttcttcccgatcatgatgttcggtctgccgggtgcggcgctggcgatgtacttcgcagcaccgaaagagcgtcgtccgatggttggcggtatgctgctttctgttgctgttactgcgttcctgaccggtgtgactgagccgctggaattcctgttcatgttccttgctccgctgctgtacctcctgcacgcactgctgaccggtatcagcctgtttgtggcaacgctgctgggtatccacgcgggcttctctttctctgcgggggctatcgactacgcgttgatgtataacctgccggccgccagccagaacgtctggatgctgctggtgatgggcgttatcttcttcgctatctacttcgtggtgttcagtttggttatccgcatgttcaacctgaaaacgccgggtcgtgaagataaagaagacgagatcgttactgaagaagccaacagcaacactgaagaaggtctgactcaactggcaaccaactatattgctgcggttggcggcactgacaacctgaaagcgattgacgcctgtatcacccgtctgcgccttacagtggctgactctgcccgcgttaacgatacgatgtgtaaacgtctgggtgcttctggggtagtgaaactgaacaaacagactattcaggtgattgttggcgcgaaagcagaatccatcggcgatgcgatgaagaaagtcgttgcccgtggtccggtagccgctgcgagtgctgaagcaactccggcaactgccgcgcctgtagcaaaaccgcaggctgtaccaaacgcggtatctatcgcggagctggtaagcccgattaccggtgatgtcgtggcactggatcaggttcctgacgaagcattcgccagcaaagcggtgggtgacggtgtggcggtgaaaccgacagataaaatcgtcgtaagtccagccgcagggacaatcgtgaaaatcttcaacaccaaccacgcgttctgcctggaaaccgaaaaaggcgcggagatcgtcgtccatatgggtatcgacaccgtagcgctggaaggtaaaggctttaaacgtctggtggaagagggtgcgcaggtaagcgcagggcaaccgattctggaaatggatctggattacctgaacgctaacgcccgcagcatgattagcccggtggtttgcagcaatatcgacgatttcagtggcttgatcattaaagctcagggccatattgtggcgggtcaaacaccgctgtatgaaatcaaaaagtaatctgctttatgcctgatgcgacgcttgagcgtcgcatccaacaatgacaagcggtggagatcttctctgccgctttttttttcatcaatcatccccataatccttgttagattatcaattttaaaaaactaacagttgtcagcctgtcccgcttataagatcatacgccgttatacgttgtttacgctttgaggaatccacgatgagtgaggcagaagcccgcccgactaactttatccgtcagatcatcgatgaagatctggccagtggtaagcacaccacagtacacacccgtttcccgccggagccgaatggctatctgcatattggccatgcgaaatctatctgcctgaacttcgggatcgcccaggactataaaggccagtgcaacctgcgtttcgacgacactaacccggtaaaagaagatatcgagtatgttgagagcatcaaaaacgacgtagagtggttaggttttcactggtctggtaacgtccgttactcctccgattattttgatcagctccacgcctatgcgatcgaactgatcaataaaggcctggcgtacgttgatgaactgacgccggaacagatccgcgaataccgcggcaccctgacgcaaccgggtaaaaacagcccgtaccgcgaccgcagcgttgaagagaacctggcgctgttcgaaaaaatgcgtgccggtggttttgaagaaggtaaagcctgcctgcgtgcgaaaatcgacatggctagtccgtttatcgtgatgcgcgatccggtgctgtaccgtattaaatttgctgaacaccaccagactggcaacaagtggtgcatctacccgatgtacgacttcacccactgcatcagcgatgccctggaaggtattacgcactctctgtgtacgcttgagttccaggacaaccgtcgtctgtacgactgggtactggacaacatcacgattcctgttcacccgcgccagtatgagttcagccgcctgaatctggaatacaccgtgatgtccaagcgtaagttgaacctgctggtgaccgacaagcacgttgaaggctgggatgacccgcgtatgccgaccatttccggtctgcgtcgtcgtggttacactgcggcttctattcgtgagttctgcaaacgcatcggcgtgaccaagcaggacaacaccattgagatggcgagcctggaatcctgcatccgtgaagatctcaacgaaaatgcgccgcgcgcaatggcggttatcgatccggtgaaactggttatcgaaaactatcagggcgaaggcgaaatggttaccatgccgaaccatccgaacaaaccggaaatgggcagccgtcaggtgccgtttagcggtgagatttggattgatcgcgccgatttccgcgaagaagctaacaagcagtacaaacgtctggtgctgggtaaagaagtgcgtctgcgtaatgcttatgtgattaaggcagaacgcgtcgagaaagatgccgaaggtaatatcaccaccatcttctgtacttatgacgccgataccttaagcaaagatccggcagatggtcgtaaagtcaaaggtgttattcactgggtgagcgcggcacatgcgctgccggttgaaatccgtttgtatgaccgtctgttcagcgtgcctaacccaggtgctgcggatgatttcctgagcgtgattaacccggaaagcctggtgatcaaacagggctttgctgaaccgagcctgaaagatgcggttgcgggtaaagcattccagtttgagcgtgaaggttacttctgcctcgatagccgccattctacggcggaaaaaccggtatttaaccgcaccgttgggctgcgtgatacctgggcgaaagtaggcgagtaattttaagtttcgctatgccggatggggcgtttacgtcgcatccggcaaggaacagacaaacagtttcaaacgctaaattgcctgatgcgctacgcttatcaggcctacatgatctctgcaatatattgagtttgcgtgcttttgtaggccggataaggcgttcacgccgcatccggcaagaaacagcaaacaatccaaaacgccgcgttcagcggcgttttttctgcttttcttcgcgaattaattccgcttcgcaatttatccataaaataaatttaaaataacaaaacataattaaataaaatgtaaccgctttcatcttgctggaatttcacgcttttattcttctgcaagcctttcaaccgcaaacttaagccttgtaacaaaaatcatcaaaatatgtgcggttgctcatgttcttacattctggttacagaaagagattgataattcgcgtcgcgaaaaatagtctgttcctgtagtcagcgagacttttctcaacgctacttttttaatttttattttttcgctgttcacctttggtgcagcaatttatacgtcaaagaggattaacccatgcgtacgtttagtggcaaacgtagtacgctggcgctggctatcgccggtgttacagcaatgagcggctttatggcaatgccggaggctcgcgccgaaggattcatcgacgatagtaccttaaccggcggtatctattactggcagcgtgaacgcgaccgtaaagatgttaccgacggcgacaaatacaaaaccaacctttctcactccacctggaatgccaacctcgattttcagtccggttatgctgctgatatgttcggccttgatattgctgcgtttacggcgattgaaatggcggaaaacggcgacagctcccacccgaacgaaatcgcgtttagtaaaagtaataaagcctatgacgaagactggtccggcgacaaaagcggtataagcctgtataaagctgcggccaaatttaaatacggtccggtttgggcgagggcaggttacattcagccaactggtcaaacgctgttagcgccgcactggagctttatgccaggtacttatcagggggcggaagccggggcgaattttgattacggcgatgctggtgcgttgagtttctcctacatgtggaccaacgaatacaaagcgccgtggcatctggaaatggatgagttttatcagaacgataaaaccaccaaagttgattatctgcactcctttggggcgaaatacgacttcaaaaataacttcgtactggaagcggcatttggtcaggcggaagggtatatcgatcaatattttgccaaagccagctacaaatttgatatcgccggtagcccgttaaccaccagctaccagttctacggtacccgagataaagttgacgatcgcagcgtcaacgacctttatgacggcaccgcctggctgcaagcgttgacctttggttaccgggcggctgacgtagtggatttgcgcctcgaaggcacctgggttaaggctgacggtcagcagggatacttcctgcaacgtatgactccaacctacgcttccagtaacggtcgcctggatatctggtgggataaccgttctgacttcaacgccaacggcgaaaaagcggtcttcttcggtgcgatgtatgacctgaaaaactggaatcttccaggcttcgccatcggcgcttcctacgtttacgcatgggatgctaaacctgcgacctggcagagcaatccggatgcgtactacgacaaaaaccggactattgaagagtctgcctacagcctggatgcggtctataccattcaggacggtcgcgccaaaggcacgatgttcaaactgcatttcaccgaatacgacaaccactccgacatcccaagctggggcggtggttacggcaacatcttccaggatgagcgtgacgtgaaatttatggtaatcgcaccattcaccatcttctgatgcccgacgcggcaggttttgtgcctgccgcacgtttgaggaatttgctatgaaaaaactgattctcatcgccataatggcaagcgggctggtagcttgtgcgcaaagtaccgcgccacaggaagacagtcgtctgaaagaggcatacagcgcctgtatcaacaccgcacaaggtagcccagaaaaaattgaagcctgccagagcgtgttaaacgtgctgaagaaagagaaacaacatcagcagtttgccgaccaggaaagtgtacgcgtactggattatcagcagtgtctgcgtgcaacgcaaaccggaaatgatcaggcggtgaaagccgattgtgataaagtctggcaggaaatacgcagtaataacaaataagtgagagctgtaactctcgcttttcttatttcccttgcataaaaaagccaacccgcaggttggcttttctcgttcaggctggcttatttgccttcgtgcgcatgttcatcttcgcggcaatcgccttcggcacagtgaccgtaaagatagagactgtggttagtcaggcgaatgccatgttttgcggcaatttcacgctgacgcgcttcgatggaatcatcactaaattcgataaccttgccgcagtcgaggcagatcaggtgatcgtggtgatgttgctgtgtcagttcaaatacggatttaccgccttcaaaattgtggcgggtgacgataccagcgtcgtcaaactggttcagtacgcgatataccgtagccagaccaatttcttcacccatatcgatcagacgtttgtataaatcttccgcactgacgtgatggttgtccggctcctgaagaacttccaggatttttaaacgaggaagcgttactttcaggccagctttctttagggcggtattgttatcagtcatgcggaatctgtcctgttactaagcggttcacttcattagaagaagtgacagaatttgctcttgagataatgcgtatcattatagaattgccacgcctaaatgaaaaccacaagtccctggcaaatattgttaataaaaacgtggcacagcttacatttacaacggcaaggccacttgaacaccgggacattgtacaggtacaacagcaaaagttacaaatttgtagcaattattttgattggcattatctattaatacggcgtagacatgagtctacgccgcatcacatcaggcattgagaatttcgtcgagatgcaactcttcagaaatctgtttaacccatttttctacacgttcagcggtcagttccggctgacggtcttcgtcgatagccagaccgacaaagtggtcgtcatctgccagacctttacttgcttcgaaatgatagcccgcagttggccagtgaccaacgatggttgcaccgcgcggttcaatgatgtcgcggatggtgcccaatgcgtcgcagaaatattcggcgtaatcttcctggtcaccacaaccaaacagcgcaaccagtttgccgttgaaatcaatctcttcgagagtcgggaagaagtcatcccagtcacactgcgcttcgccgtaataccaggttgggatgcccagcagcagaatgtcataagcttccagatcttctttgctgctttttgcaatgtcatggacatcggcaacgtctttaccaagctgtttttgaatcatttttgcgatattttcggtattaccggtgtcgctgccgaaaaagatgccagtgatagccatgagtgaaataacctcttgaaacttattgaaatgggggtggaaaattgcccacggataaaggcaatcatagcagaacaggcagtcttgcggaatcagcaaacgagcaggactgcacactgtgctacatgaaagtggaaatttaaacgatgccctgactacgcagcgccgccagttgctgcattaacatctcttcgatcagttcgctacggctcatattgcggctctccgccagctcgttcagcgcctcgacagcttccgcgttcagcttcagttcgacacgcttaaggccacgtactttgtcgcgttttagctggttgcgtttattaatacgcagctgttcatcgcggctaagcggattagttttcggtcgtcccggtcgacgctcgtgcgcgaacagatctaatgtcgtacggtccgtttgttctttggccatgatcttggtgacttcgggggaaacaatcagccaggcctctgcccggatggatagcgcgccataatacatcagcgcgatgagtcacgccaacgcccacgcgcggaaagcgacgcggacgctgggtttttaatcagttgcgttaatcattgagatagcgacggatagcgcgtaataccgcatccggtttttcagcatggacccagtgacccgcgcctgcaatcacatgcgcccgtgcctgtggaaattgagccagtaaatcatcacggtactgctcgctaacatacggagaattgccgccagggataaacagggcagggtgatcccatgccgggattttctcccaacctacaatatgcggatactgatcccacaataccggcacgttaaagcgccactccccgtcaacaaaagatttcagcagaaactgaatcaccccttcttcattaagatgctggcgcattattgctgctgcttgctggcgagtttgtgcgtcgctttcactgaccgcgttgatagccgcaaaaatctcatcatgacggcgtacgtgatagtcgaccggcgcgatatcgatcgccaccagtttatcgatgcgatcggaggctagtgcagtaagtgccattaccgctttaccgcccatggagtgaccgataaatgttgctttgtcgatctgctgtgcatccagagtatcaacaagatcctgcgccatcgccgggtaattcattaccggatctctcggactaagaccgtggttacgcatatcaacctggatgatattgtgatcgtttaccagatcgcgagccagtacgccaaggttgtcgaggctgccaaacagaccgtggacaagaacgatgggagaattattgtgctggttttgtgcagtttgcgcgcggatattcaatttcatggcaaagttctttttttcgcgttgtcgggttagggtattatgttgaccattgtgccacagggctgcaacaaataaggtttattccgagtttttctgcaagccaggcttgacgctatccgctgccgggatttattcatatactcctggcgacttgtattcagctaagacactgcactggattaagatgaaaacgattgaagttgatgatgaactctacagctatattgccagccacactaagcatatcggcgagagcgcatccgacattttacggcgtatgttgaaattttccgccgcaagtcagcctgctgctccggtgacgaaagaggttcgcgttgcgagtcctgctatcgtcgaagcgaagccggtcaaaacgattaaagacaaggttcgcgcaatgcgtgaacttctgcttagcgatgaatacgcagagcaaaagcgagcggtcaatcgctttatgctgctgttgtctacactatattctcttgacgcccaggcgtttgccgaagcaacggaaagcttgcacggtcgtacacgcgtttactttgcggcagatgaacaaacgctgctgaaaaatggtaatcagaccaagccgaaacatgtgccaggcacgccgtattgggtgatcaccaacaccaacaccggccgtaaatgcagcatgatcgaacacatcatgcagagcatgcaattcccggcggaattgattgagaaggtttgcggaactatctaaaacgttgcagacaaaggacaaagcaatggcaatccacaatcgtgcaggccaacctgcacaacagagtgatttgattaacgtcgcccaactgacggcgcaatattatgtactgaaaccagaagcagggaatgcggagcacgcggtgaaattcggtacttccggtcaccgtggcagtgcagcgcgccacagctttaacgagccgcacattctggcgatcgctcaggcaattgctgaagaacgtgcgaaaaacggcatcactggcccttgctatgtgggtaaagatactcacgccctgtccgaacctgcattcatttccgttctggaagtgctggcagcgaacggcgttgatgtcattgtgcaggaaaacaatggcttcaccccgacgcctgccgtttccaatgccatcctggttcacaataaaaaaggtggcccgctggcagacggtatcgtgattacaccgtcccataacccgccggaagatggtggaatcaaatacaatccgccaaatggtggcccggctgataccaacgtcactaaagtggtggaagacagggccaacgcactgctggccgatggcctgaaaggcgtgaagcgtatctccctcgacgaagcgatggcatccggtcatgtgaaagagcaggatctggtgcagccgttcgtggaaggtctggccgatatcgttgatatggccgcgattcagaaagcgggcctgacgctgggcgttgatccgctgggcggttccggtatcgaatactggaagcgtattggcgagtattacaacctcaacctgactatcgttaacgatcaggtcgatcaaaccttccgctttatgcaccttgataaagacggcgcgatccgtatggactgctcctccgagtgtgcgatggcgggcctgctggcactgcgtgataagttcgatctggcgtttgctaacgacccggattatgaccgtcacggtatcgtcactccggcaggtttgatgaatccgaaccactacctggcggtggcaatcaattacctgttccagcatcgtccgcagtggggcaaagatgttgccgtcggtaaaacgctggttagttctgcgatgatcgaccgtgtggtcaacgacttgggccgtaaactggtagaagtcccggtaggtttcaaatggtttgtcgatggtctgttcgacggcagcttcggctttggcggcgaagagagtgcaggggcttccttcctgcgtttcgacggcacgccgtggtccaccgacaaagacggcatcatcatgtgtctgctggcggcggaaatcaccgctgtcaccggtaagaacccgcaggaacactacaacgaactggcaaaacgctttggtgcgccgagctacaaccgtttgcaggcagctgcgacttccgcacaaaaagcggcgctgtctaagctgtctccggaaatggtgagcgccagcaccctggcaggtgacccgatcaccgcgcgcctgactgctgctccgggcaacggtgcttctattggcggtctgaaagtgatgactgacaacggctggttcgccgcgcgtccgagtggcacggaagacgcatataagatctactgcgaaagcttcctcggtgaagaacatcgcaagcagattgagaaagaagcggttgagattgttagcgaagttctgaaaaacgcgtaaacacatttaataaaaaaagggcggtcgcaagatcgcccttttttacgtatgacaaacacagaattgcctgatgcgctacgcttatcaggcctacgaggatggtgcaatatattgaatttaagcgattttgtaggccggataaggcgttcacgccgcatccggcaaaaacaacgaacactttgtcaacaaactgagtagctcaaggaaatcccaatgaagaccaacaggagtctggtcgtcatagtgagtctaattaccgccacattactgctgactgcatgcgcccaacctgaacaaagtagtttagctggcgactggttactgacccctaaagataaaaccagaggattaacgggtagcattgcggtaaatattgcacctttccggtgtaagacaaattgccgtggtgataacttacctgataatacccgccgctggcagttgagtggcgggaacgaaaaagaacttacttatcttcataatatgagtgcacaagaaaaggtcggtttaaatcccggttggcaatgctacaccagtttttttatgcgggtttgccagggcaagcccggcactcgaccgatagtcaatgaggattatgtcagcgaaagcggattttttggcagcatgatgcatgtcgggattattgagttacgacgctgccagagtgaaaattgccagcaagaattgaaagcgataaatacacattaaaatagtgagtccgggaatgaaacccggacctgaacatgtcttattgcgtgaatgtttctttcatttgatactgcatttcccagagttcagtaaggctaataacttttcttgttcttgcttcttcactttgtacccataagaaagggtagaacgtgaaggcttccgttgcgcttaattttattacgtcttctcgccattgctgccatcgtacattttcatagaaggtatctaaatcaccggataatgcccactgaagaaactcagaatatccaacttccagactttcccaattcagcgtatctggcgcaaaataataaacgcagccagtatcttccccaagatcgccaccattaagagcaaaaattacccctgcgacatcgtcagcgatgggtaaagcccgcacgcctgcgaattcagggcgttgtgtccaacttactggatctcgtggcaaccgggggtgaccagatcctgctatgcgtaattaaccattatcaatcagcagacctccggagccatagacaagcgcacccatcggactttttgttgtcacctgtaattgataaagtgcggtttcggctaaatctttattaaccggtaagagttcggtatggtttgtggcgtcttttaaccagttctggattattggccaggcactatcttcagtatttactaactgattcatttcacgcatcgctacttgctccttgtgtgctacggtgtcatttatgatgaggaattgtatggaacattttttaaatattaagttccttatatttgaataaaaaatgactttatccatacattgccacttttttcaaagcataaaccgatacccaataccggtttcagtaataaaatggcgaggccgggccggatcctgttccagtttttgtcgcagatgccccatataattacgcaaatagttgctgtgttcgatcgcgtttagaccctacatctgccggatgcggcataaataacgaactatttgccaacaaacagaaagggcgatcattcaatcgcccttttttactttgttttattaaccgtgtttatttttcagttcaaagcgtggacttaccagaccatacagtgtccaaccaaggaaggtcacgatggaaccgtacagcatggcttcttccccggaactgtacagcgcataaaagctatacatcgcgccaacaaaagcaacaaagtttgcaactttcgctttactggggggcacattagcgaccttctgaataatgactaatgccgccatactcagaatatacggaatgatattggtcaccacggccaggttaaccagcacgttgaactgactgtttaggctcgggctaatggtcatcagtgccaatccactctgaataatcacaatggtcaacattccctgcaccggtgcatccactttggttacacgggagaaaattttagggaagtagccttcatcagaactagatttaaacacctgggcaatggtgaactgccagccaagtaggctaccgcagcaggacatcaccatcagcgccataatgactttacccacttccggcgtgaacatctgcgcgaaggccagaccaaatggtgccgtactatttgccagctccatatttggcacaatcccggcaatcacgttggtggagacgatataaatcaccgccgcacctaacgtaccgccgagtaccgcgattggcacattacgttccgggttttccactacatcagtattcgcacacgcagactccagaccaagaaaagcccacagcgtcatagcgatggaagaacctaccgcactgaagaacggtgcatgatgcggattccaggaatcaacgtacagcgtcgggctaaaccagaaccagccaataatgcacagaccgacgaccggaataatgaccccccacacggtaatgctactgatttgcccggtaatgcgcgcaccaccaaagttagccacggtacaaatccacagcaccccgatggtcgcaagaccaatctgcactgggctcaaactcgcgccgagcagttcggtgccgtaaccaaccgcgctaatagcaatcgcgacgttagcaatcagcagactgacgccgtaggtatagttcgccataaagttaccggatttaccgaaagcatactcggcataaccgcccataccgccacttttacggctgaacataccgcattttgcgaatgcccatgccagtgccatactgcctacggctgtcaccagccaggagataatactgattgtcccgacttcggcaagctttgtcggcagcatgatgataccggagcccatcatgttgaccatcgtcagtatggttaactgaacgacgcccattttgttgcttttagcctgactcataatttttcccctttcaacagggtgctttgcgcatcacgaggcttgatgacatagcaccaaacttgcttacgaccatcatgttcttcgatatagacaccctgcagctccggtgcaaaacctggcagcaggttgatcccttcttccagagcgctgaagtaacgcagaacagcaccaccccagatttcacccggaacaacacacagcacacccggaggataaggaagcgcaccttcggcagcgatacggccttctgcatccggcagacgaaccagttccacttcaccgcgtaaataggcgtagttggcttcttgcggattcatgctgacgcgtgggaagtgctccttacggaacatctctttttgcagttgtttcacgttgtggcgggcatacaaatcatgcatttcctgacacaactgacgcagggtataaccggcgtagcgctcttcatgctgtttgtagatggaaggtagcacttctgctaatggcgcgtcggactcaagcagtttttcgaagcgtaccagcagggcaacaagttgctgaagtttggccatatcttctgccggagtcagcaggaagaggatggagttaagatcgcatttttccggcactacgccattttcgcgcaggaagttagcaagaatcgtcgcgggtacaccgaacgcttcatattcgccgttacgtgcatcaatacctggggttgtcagcaacagtttgcatggatcgacaaagtattgattctctgcatagccttcaaaagaatgccagtgttcccctggtacaaactggaagaagcgcagatcaaccgcaatttgcgctgtttcatagctctgccagggtttaccatccaccagttcaggtacgaacggacgaatatgctgacagttatcgaggatcagtttgcgggcattaatgccatttaccacacaatccatccacatattacgaccgctgacaccttcatgcattttggcgttgatattcagtgcggcaaacagcggatagaacgggctggtggaggcgtgcatcataaaggcgttgttcatgcgtttgtgcggtacataacgctgttgccctttgatgtggctgtcttttttatgaatttgactagtctgagaaaaaccagcctgttgtttatgcacagattgcgtaaccagaatacccggatcgttctcattaagatccagcaacagcgggctacagtccgccatcatcggaataaactgttcatagccgacccatgcactgtcaaacaggatgtagtcacacagatgaccaattttatccaccacttggcgggcgttataaatcgtaccgtcgtaggtgcctaactgaatcacagcgaggcggaaaggacgagcctcttttgcccgctgcggtgcgacttccgcgatcagctcacgcaggtaactttcttcaaaacagtgcgcatcaatgccaccgataaagccatacgggttacgtgccgtttccagataaaccggtgttgcaccagcctgtagcaacgctccgtggtggttagatttgtggttattgcgatcaaacagcaccagatcacccggtgttagcagggcgtttaaaaccactttgttagaagaactagtgccatttaaaacgaagtaggttttatcggcattaaacacttttgccgcatgttgctgtgcaatgcatggcgcgccttcgtgaatcagcagatcgcccatcgctacgtcggcgttgcacaagtcggcacggaacagcgcctcaccaaagtattccacaaactgattccccgccggatggcgacggaaaaattcgccgccctgatgaccagggcaatcaaacgcgctgttaccttgattgacataatcgaccagtgcgcggaagaaaggtgggcgcagttgagtttcataatggctggcagcggtttctaactggcgaccataaaattctcgtcggctttcgcaattctcaaagacaccgctaatacggggcaaatactctgcgggtacacgttcttgattttcagtagcaataaataccgggatgccataacccgtggcatcgatttcatcgagttttccgcatgtaacatcgttgaggcttaaaactattgccgccacatcgatattacgactttcattaatgtagatacattctcgctgcgtggtaaaacagtccgggcaagaatcactaaccgcaatttttaatttactcatttttcatctctttattttaggtaatagcaggtcctcaatttctcgaatgagaaatcgatcgtgccggaaaaaagcaaagttaccccgctgataaataaatcaggtagattgcttttttcagaatgcagaaacccttaccagtcaggtggctgataatacaagggttaacagagaatgagcactgcggaatacaggcatatgcctgtaatacagagagtcaggaagacctgtacgctgaagtgcccttagtcggtagactaacgggcattgaagaagtgaaagtcgaagctattgcgatgagcaaacttcataatatgagttgtccgccttatatggggcatagtgcggctgttattttccatttaatttacctttcctgatgtgaatgaaggtgaagatattctatccaggaaatacggttgaactgtgaaggtgatcaataaaaaatgatcaatcttaatttatttaatgatgagctttttactcagtaatataaaatattgaattgttatttttgtgtgttgtttaagataaaaagccgtatttattattacggctttaattaataaaaggcaggctgtattaaaattaatattcaaagcataaaccgatagccaataccggtttcagtaatgaaatggcgtgggcgggcgggatcctgttccagtttttgtcgcagatgtcccatataaatacgcaaatagtgactgtgttcgaccgcgtttggcccccacacctggttaaggagctggcgctgggtgagtacttttccggcattgttgagcagcaccgccagcaggcggaactcaattggtgtgagatgcacctcttcctcaccccggtgaatcacgcgggcggctaaatcgacggtaacatcggaaaattttaccagcggatcgggcgcggtggtggcagagtggcggcgtaatgcgacgcgcagacgggcctgcaattcgccaatgccaaacggcttactcagataatcatccgctccggcatccagcgcggcgattttgtcgctctcttcgctgcgtgcggaaagcacaatcaccggcaccgcgctccactggcgcaggtcgcggataaactcaatcccatcaccatcgggcaggccgagatcgagaataatcaaatctggcttacgggttgccgcttccagcaagccgcgttgcagcgtttcggcctcaaagacgcgcatcccgtcgccctccagcgccgtgcgcagaaagcgacgaatagcctgttcatcttcaacaatcagaacgtttgtcacatatcctcatgaaattcttcaagttcaggggcagtttgctggggaagtgtaacacgaaaacaggcaccaccttccggtcggttgaacgcggtaatagtgcccccgtgtacatccactatcgcccgacaaattgccagtccaagccctacccccggtactgcgctctctttattcccgcgagcaaacttatcaaatatcgtctgctcctggcctggcggaagaccggggccgttatcccagacatccagttgtagattttcgccctcaacgtgggcatcgataccaatttcggcctgcgcacccgcatatttcaccgcgttctccagcagattaatcagcacccgttcaaagagtggcccgtcaacgtggattaaggtcagcggttctggcagagaaagattgatggggctgcttaaacccggttccagcatttgcagcgcgctgccgactacttcttccagcgttaaccactctttcttcaaattaaagccgccggactgaattcgcgccatatccagtagattattcaccagtcgggtagtgttcagcacatgctgacggatctcgctggcctggcgggcgtggggacttccttcgcttgccagatcgagcgttaagatttctgcctgaccaaacagcaccgtaagcggcgtgcgtaaatcatggctaagcgccgccagcagggcgttgcggatctgttcacgttcgcttgccatccgcgcctgttcttcgctggcggttagcgtcagccgctcaagggcattggcgactaacagcgtaaacgtctccagcaggcgctgctgttccgggatcatcaactggcgcagattccccggctccaccaccaccagcccgtaggttttctcgccgctttttagcggcaaaatctggtacggtacaccgggtaacgtgtcggtgcccgcgcccgcaggcaggcctttatcaaaactccactgcgcgatggcatcgtcccacggcgtcattccttgcggatgtgttaacggctgcaatttaccgttgtcatcgggcaacaacacctgactgcgggcatgaaacgtggaggcaataaattgttcgctggtggcagcgatatcctgcggactgcggcccaccgccagagctttgctcatttcatataagtgccgtgtgcgttgctcgcggtaacgggctacccgcgcctgataacgcacgccagcagtaaggttcccgatcaccagcccgacggttaacatcaccgcgaaggtcagcagatattgcacatcagagacggcgagcgtgccgcgtggggcgataaaaaagagatcgaaactcactacattaatgacggtggcaaccacactaggccagcgtccataaaatagcgccaccaccaccacgccaagcagatacagcatcaccaggttggcggcatcaaacgccatcagccactgcatggcaattaaggtgataacggcgcataacgcggcggcaaccacgcatccctgaatttgtacacgccacttgtctttaaaagagcggttatccggcgcgttgttaatcgtgcgggcgggtggttcatcaagcgcgaccagcacctgatcgagatcgggggcgatgcgcgccagtcggtcagcaaacgtttcccgacgccaccagcggcggctggccgggcgaccgagaataatcttgccgagattatgttcacgggcataacgcactaccgctttctcttccgctggatcagaaagtgttgccgtctccgcgcccagttcctgcgccagacgtaaggcgctgagaattgcccgacgttttttttccggtaagcggtgcagggcaggggtttcaacatacaccgcgtgccagacgctacccagccgactcgccagccgcgccgctgcgcggaccagtttttcgctgccggtgttatggccgatgcataaaaggatcgcgtcgcgcgtgcgccacactttctcttcgccaggatgcccccgccaggcgcgcatttgctcatcaacgcgatcggcagtacggcgcagtgccagttcgcgcagggcgatcagattacctttgcggaaaaaatgttcaatggcgcgctccgcctgcccggcaatatagactttgccttctttcagccgctggcgcagatcgtccgggggcaagtccaccagcaccacgtcgtcggcggcatcgaaaaaaggatcgggcacggtttcccgtacctgaattccggtgacgccgctgaccacatcattcagactttccagatgctgaacgttgacggtagtgaaaacatcaatgccagcttccagcagttcttcgatatcctgccagcgtttgggatgacgggaacctggcgcattactgtgcgccagttcgtccattaagatcagcgccgggcggcgggcgagggcggcatcgagatcaaactcgctgatatgccgcccacggtacgcctggcgttttaacggcagaacagccagcccttccagcatggcggcggtatcttttcgcccgtgggtttctaccacgccaaccacaatatccagcccttgcgcccgcagtcgctgggcttctgccagcatcgcccaggtcttcccgacgcctgcacaggcaccgaagaaaactttcagcttcccccgatgcggcgcggcagtttgttccagcagacgatcggggtcgggacgtaagggttcgttattcatcaagtttatccagcgccagattgagttcaacaatgttgacaaccggctggccgatatatttcaccagcggttgttggctgtattttgcgatcagttgcgtgagctgttcaacgctgagattacgcgctttcgccacgcgtgggatttgccaggccgccgcttgcggggtgatattattgtccagcccgcttgcgcttgccgtcaccagttcaaccggaacgctcgcgctggcatccgggttagcggcccgtaatgcagcaacgcgtgcggctattagtttatccagctcagggttactgaccgccagattgctcccgccagaagcctgtggattatagggcatttctgccgttgcgctcgggcgaccatgaaaatagccgttgccggtaaaattctgcccgattaatgcgctaccgcgcaccgtatcaccttcacgaatcaagctaccattggcctgccagggaaaccaccattgccccagtacggtggtcagcagcgggtaaacgccgccagtaatcaataacagaaagataaatgtacttaatgccggacgtaatccactcatggtaaacctcacaccagaccgcaaacggtcagcagtaaatcaatgactttgataccgataaacggcaccagcagcccacccagaccgtaaatccataagttacggcgcaacatggcagaagcggtaagcggtttataactcacgccttttaacgccaggggaatcaaaaagacgataatcaaggcgttgaaaatcaccgcactgaggattgcggagtcggggctatgcaggcacatgatgttcagcgcatttaactgcggatacgttgccgcgaatgccgccggaataatggcgaagtatttcgccacatcgttggcaatgctgaaggtggtcaggctgccacgggtcatcagcatctgtttgccaatgtgcaccacctcgatcaacttggtcgggttagagtcgagatcgaccatattgcccgcctctttcgccgcctgggtgccggagttcatcgccaccgcgacatctgcctgcgccagcgccggagcatcgttggtgccgtcgccggtcatcgctaccaaacgaccttccgcctgatactgacggatcaatgccagcttggcctccggtgtcgcttcggcgagaaaatcatcgacacccgcttccgcagcaatcgcggcggcagtcagacggttatcgccggtaatcatcaccgttttaatgcccattttgcgcagctgggcgaagcgctctttaataccgcctttgacgatatctttcagcgcaataacgcccagcacacgagaaccttccaccaccaccagcggcgtggctccctgacgcgcaacctgatcgactttttgatcaacatcggtagggaagtgaccaccgttagcctcaacatggcgacgaatggcatcgacagaacctttacggatcatgcggttgtcgatgttgatcccgctcatccggctttgcgcagtaaacggtacaaaggtggcatggaggctctgcacatcgcgctcgcgcaggttaaaacgctgcttggcgaggatcacaatactgcggccttccggcgtttcatcagccaggctagccagttgtgcggcgtcagccagcgttttttcatccacgccctgcgcggggataaactcgctcgcctgacggttaccgagtgtgatggtgccggttttatccagtagcagaacgtcaacgtcacctgccgcttcaactgcacgtccgctggtggcaatcacattcgcgcctagcatccggctcatcccggcgacgccgatcgcactcaacaggccgccaatagtggttgggatcagacagaccagcagcgccaccagtaccgttacgctgactgcattaccgccccacgcggaaaacggccacagcgtggcggttgccagtaaaaagacgatagtcagggcaatcagcagaatggtcagggcaatttcgttcggcgttttgcgtcgctgtgcgccttccaccatcgcgatcatccgatccagaaatgtctcgccggggttaacgctacactcaatcaccagccagtcagaaagaatacgcgtgccgccggtgacggaggcaaaatcgccgccggattcacggatcaccggtgcgctttccccggtgatggcgctttcatcgacgcttgcacccccttcaataacttcaccatcgcaggggataatatcgccagcttctaccagtacgatatcgcctttacgaagttggtcggcaggaactttgtccgccgcagcgccatatttcggctcacgcagcttgcgggcaaaggcagtttttttcacccctttcagactgttggcctgcgctttactgcggccttctgccagcgcctcggcgaaattagcgaacagtacggtgatccacagccaaccgctaatggccgcgctaaacagcgcattgccgggcatcgcaccgcttgccatcgcgatgctaatacaggtggtcagcagactgccgatccagacgataaacatcaccggattgcgccattgcgcctgcgggtttaattttttcaccgcttctttcagcgcctgaacgacaagtgttggttcgaatagcgccagttgtttacgactcatattcagtgctcactcaatatcatcaggagagatattccgccaccggaccaagcgccagggcagggataaaggtcagtgcgccaaccagcaacacggtgccgattaacaggccaacaaacagcgggccgtgcgttggcagcgtgccggagctggcggcttggctctttttactcaccaggctaccggcaattgccatcaccgggataatcaccccgaagcgaccgacaaacatgcagaacgccagtaaacagttccagaacggagagttggcgcttaatccggcaaaggcgctgccgttgttgttagcggcggaactcacggcgtacagcacttcgctaaaaccatgcgggccagggttgagcatggcgctacgtccggcgtcggtcatcatcgccaacgccgcgcccatcagcaccagcgtcggggtaaccagaattgccagtgcagtcagtttcatctcgcgtacgtcgatttttttacccagatattccggtgtacgaccaatcatcagcccggcaataaacaccgccagcaggacaaacagcatcatgccgtaaagaccagaaccgacaccgccgaacaccacttcaccaatttgcatcagccacatcggcaccatgccaccgagagcggtaaagctatcatgcatcgcaatcaccgcgccacaggaagccgccgtcgtcacgaccgcaaacaggctactgaccagcacgccgaaacggctctctttaccttccatattgatgctgctgtccgtgcccagtgccagcagatgaggattaccctgaacttctgcccacatcaccacgcctacgcagatgacaaaaatcacactcatcgcccacagcaacatgcgcccctggcggcgatcgcccatcacttcaccaaaggcaaagcacagcgccgttgggatcaagaagatcgccagcatctgcacgaagttggtcagtgcggttgggttttcaaacggatggctgctgttggcattaaagaagccaccgccgttagtaccgagcatcttgatcgcttcctgagaagctacaggccccatgggtaacagctgttgcgctccttcaacggtattcacagcctgataaggcagaaagttttgcagcgcaccttgttgaataaaaaacagtgcaatcaacaacgccacagggactagcacccataacgtgatgcgtagcagatcgacccaggcattcccgagcgtgctcatgctctggcgggtaaacgcacggatgagggcaaaaatcaccgcaatcccgctggcggcagaaagaaagttttgcaccgttaagcccgccatctggctgaaatagctcaacgtggtttcaccgctataagattgccagttggtattggtgacaaagctgacggcggtattcagcgccagatcccagctcagccctggcaactgctgtggattaagcggcagatagtgctgaccgagcaacataaaaaacagcaccgccagccccagcatgttcaggccgagaatggcacaaagatattgcttccagttcatctcacggtcagagacgccaagtgcgcgaaaaagtacgcgctcaacgcccgttgtaccgggaagaggaatgtcattaatcagccgcgccagcccgctgcctaaaggacgcgccagcaccattaacaccagtaaaaacgtggcgatcagtaagaacccttgcgcagccatcagaacgcctccgcattgatcagggcataaaccagataacccagtaataaaaacaccagcaatacgccggttatcacgcctgcactcacagtgcacctccagtggcctaaaagtgataccggaagggtagaattctggctgcaaagatttcgcaaaaatctgcgggcggggtgtaaaaaaagtataaaaatggcaaaagccatgatttaactaatgtttagtattaatttaacttttgtgtaacttaattacaggatgaatgtaaataaaccatcaataagcaaaaataagtggtcggatgagtagtaaaattacacaaaaggcggtactattttcatcagataaacaaattcatttttccggtgccattcaccgggtagatacaaaagggggagaaaagtatggaactctacagagaatatcctgcatggcttatctttttacgccgtacttatgcggttgcagcgggcgttctggcgctgcctttcatgcttttctggaaagaccgcgcccgcttttacagctacctgcatcgcgtctggagcaaaaccagcgataaaccggtgtggatggatcaggccgaaaaggcaactggtgatttttattgattgctgagttttgaatacattgaacgtctacacttactcctgtaaaccgctcaggagcagtaatgaatctacaacgatttgatgacagcaccctaatccgtatctttgcccttcatgagttacatcgactgaaagaacatggcttaacgcgcggggcgcttctcgattatcacagccgctataaactcgtctttctggcgcattctcagccggagtaccgcaaacttggcccgttcgtggctgatattcaccagtggcaaaatctggatgactattacaaccagtaccgccaacgcgtagttgttttgctttctcaccccgccaacccgcgcgatcacaccaatgttttgatgcacgttcagggttattttcgcccgcatattgattccacagaacgccagcagctggctgcgcttatcgacagttatcgccgtggcgagcaaccacttcttgcgccgctgatgcgtatcaaacactatatggcgctttatcctgacgcctggcttagtgggcagcgttatttcgaactttggccgcgtgtgattaacttgcgccatagtggagttttatgactacccatctggtctggtttcgccaggatttacgtctgcacgataatctcgcactggctgccgcctgccgcaatagctctgcacgcgtgctggcgttgtatatcgctacaccacgccagtgggcgacgcataacatgagcccgcgtcaggctgaacttatcaatgctcaactgaatgggctacaaatagcgcttgcggaaaaaggtattcctttattgttccgtgaagtggatgactttgtcgccagtgtcgaaatagttaaacaggtgtgcgcggaaaacagcgttacccacctgttttataactatcagtatgaagtgaatgagcgggcgcgggatgtggaagttgaaagagcgctgcgtaacgtggtgtgtgaaggatttgatgacagcgtgatcctgccgcctggcgcggtgatgaccggtaatcacgagatgtacaaagtctttacgccttttaagaatgcctggctgaaacggctgcgggaagggatgccggagtgcgtcgctgcgccaaaagttcgtagtagcggaagcatagagcccagcccatccattacgctgaattatcctcgtcagtctttcgatactgcgcattttccggtggaagaaaaagcggcgattgcgcaattacgccagttttgccagaacggtgccggagaatatgagcaacaacgagattttccggcagtggaaggcaccagccgtttgagcgccagcctggcaacgggcgggttaagccctcgccagtgcttgcatcgcttgttggctgaacagccgcaggcgctggacggtggggccggtagtgtctggcttaatgagctgatctggcgcgagttttaccgtcacctgataacgtatcaccccagcttgtgtaaacatcgtccatttattgcctggacggatcgtgtacagtggcagagcaatcccgcacatttacaggcctggcaggaaggcaaaacgggatacccgattgttgatgccgctatgcgtcagcttaacagcactggctggatgcataacaggctacggatgattacagccagttttctggtgaaagatttattgatcgactggcgcgaaggcgagcgatatttcatgagccagctgattgatggtgatttggcagccaataacggtggctggcagtgggccgctagtaccggaaccgatgcagcgccgtattttcgtattttcaacccgacaacccagggcgagaaatttgatcatgagggcgagtttatccgccagtggctaccggaactgcgcgatgtgccagggaaagtggtgcatgagccgtggaagtgggcgcagaaagcaggtgtgacgctggattatccgcaaccgatagtcgagcacaaagaagcgagagtacaaacgttggcagcgtatgaggcggcgcggaaggggaaataacagacgcgtcaggcaatcgagcccagatgccggatgcggcgtgaacgccttatccagcctacaaatttgtgcaaattcaataaattgcaggaaatacgtaggcctgataagacgcgtcaagcgtcgcatcaggcatcggtgctggcctattaagactccagcgccagcgcgcggtttctgaatttcagcgcctgatacagccaaatcatcagtaccagtcctacacacgccagtgcgccccaggtaatttgatcaaatacttcaatatatgcattgatggagtagttgatcgccccggaagcatcaaagctagcctggcttgtctgatcggcaatcacgcccgccagatagttcgcgatcgcgccagaaagcagcatgtagatgccggttaatacgccggtcacaccggggatttcaatgcgcgtaatttggctcatggcaaccgggtcgataaacagttccgcaaagcccatcaccgccaggcctaataccatcagtggcagagaagagtgaccatacattgcggaccagcgggcgcttaaggtcagaatgcagaatccggcgctcatcaggccaaggccaagagcaaatttcccccagatgcgcacggtacgattacccgcgacactctcttttaccacccacgccaggaacacaccgcacagcataactgcgaaggcattaatgctctggaacatcgcggtcggaacggtataaccaaacatatcgcggttaacgaagcggtcgatataaaggctaatgctgctaccgccctgttgtgcgaaggcccagaacaacatactgaagaaggtgagcgtcacaatcagccccagctccttccgctgtttctggttttctgctttgcgataaatttttgccagtacacccaggccaataatagtcgcgacaattaaggcgtatacgctccactctttccagaacagtatggtaatcagtgcaggcgttgccaccagcagaaccagcagccatccccagttcggcaggagaaagtttgtcgcacgcagtacttttttgttaacgccgcgggtatgagtgaaatgacgattgccacataagaaaatgaccagacccgcgatcatgccaaccgccgccaggccaaagcccatcgcccagctgtactcttcctgggcgtaaccacaggcgataggtgcgataatagaccccacgttacccgccgcatacatcaggctgaaaccgccatcacgacgcggatcggttggctcatacagctcgccgagcagacagcttacgttagatttaaacaggccatagccgcagacgataatcgccagggacagatagaggaaactcggatggatctcactggcacccagcaccacatgaccgatcgccatcaacaacgcccccagcatcaccgccatgcgattgccgagaactttatccgccaaaaagccaccgaggattggcgtgacatacaccaggctacagtaggcgctaaataactcgtaggcgtgagtatcgttgtattttagttgattggtgagatagagaatcagcagggcacgcatgccgtaaaagctaaaatattcccagatttgcagcgcaacgacatagtaaatagcgcgcggctgacttgcgtgtttattcataataattccacaattgacggcaacgtcacgtaatagttgcgcggcgtgcttgtgtttccttaaagttaaaactttgatacagatctgattatttatgcaatatgctgtctgattgcataaatatacattagctgaagcgtgatgatataaacaatttgcgtcttttggcgtcgggtttgtttcttaatatgtcaaaagattggctatcgacgaactggcgaggtaacgctatgttaacggtgtagctatcagaatacggaaggcgcgaagatgaaaaacaccgaactggaacaactgattaacgaaaaactgaacagcgcggcgattagtgattacgcgccgaatggtttgcaggtggaaggcaaagagacggtgcaaaaaattgttaccggtgtcaccgccagccaggctttgctcgatgaggcagtgcgtctgggcgcggatgcggtcattgtgcatcatggctacttctggaaaggagagtctccggtcattcgcggaatgaagcgtaaccgtttaaaaacgttgctggcgaatgatatcaacctgtatggctggcatttgccgcttgacgcacatcctgagctgggcaataacgcacagctggcggcgttactggggatcacggtcatgggcgaaattgagccgttggtgccgtggggcgaactgaccatgcctgtgccgggactggagctggcttcctggattgaagcgcgtctgggacgtaagccgttatggtgtggcgataccggacctgaggtggtccagcgcgtcgcctggtgcacgggcggcgggcaaagttttatcgatagcgccgcgcgttttggcgtggatgcttttattactggcgaagtttctgaacagaccattcatagtgcccgcgagcagggattgcatttttatgctgcaggtcaccatgccactgaacgtggtggtattcgcgcattgagcgagtggctgaatgaaaataccgatcttgatgtgacctttattgatattcctaatcctgcataacgaataatcagagggatcgaaagtgcaacgagcgcgttgttatctgataggtgaaacggcggtagtgctggaactggaaccgccggtgacgctggctagccagaaacggatctggcgactggcgcagcgtctggtggatatgccgaatgtggttgaagccattcccggcatgaacaatatcacggtgattttgcgtaatcctgagagcctggcgctggatgccatagagcgtttgcaacgctggtgggaggagagcgaggcgctggagccggagtctcgctttattgaaattccggtggtttacggtggtgcaggcggaccggatttggcggtggtcgcggcgcattgcgggttgagcgaaaaacaggttgttgaattgcactcctccgtggaatacgtggtctggtttttaggttttcaaccgggcttcccgtatctcgggagtttgccggaacaactacacacgccacggcgcgctgaaccgcgcttactcgttccggcaggttctgtcgggatcggcgggccgcagactggtgtttatccgctggcaacgccgggtggctggcagttgattggtcataccagtctcagcctgtttgatccggcgcgtgacgaacccatcttattacgtccgggagacagcgtgcgctttgtaccgcagaaggagggagtatgctgaagattattcgtgcgggcatgtataccactgtgcaggatggcggtcgtcacggttttcgccagagcggtatcagccactgcggcgcactggatatgcccgcgttacgcattgctaacctactggtgggtaatgacgccaatgcccccgcgctggagatcacgctcggtcagttaactgttgagttcgaaactgatgggtggtttgctctgacgggtgccggttgcgaagcgcggctggatgataatgccgtctggaccggctggcgattgccgatgaaagcaggccagcgtttaacgcttaaacgcccgcagcacgggatgcgcagttatctggcggtcgcgggtggtattgatgttccgccggtaatgggcagttgcagcaccgatctcaaagtggggattggcgggctggaaggccgtttactgaaggatggtgaccgactcccgattggcaaaagcaagcgtgattctatggaagcgcagggcgttaaacagctgctgtggggcaaccgcattcgcgccttgccggggccggaatatcatgagttcgatcgcgccagccaggatgcattctggcgtagcccctggcagcttagcagccaaagtaaccgcatgggctatcgcttacaggggcaaattttaaaacgcaccaccgatcgcgaactgttatctcacggtttgttaccgggcgtggtgcaggtgccacataacgggcagccgattgtgttgatgaacgacgcacagaccaccggtggttacccgcgtattgcctgtatcattgaggctgatatgtaccatctggcgcaaattccgctcggtcagccgattcattttgtccagtgtagtctggaagaggcactaaaagcacggcaagatcagcaacgttattttgaacaattagcgtggcggctgcacaatgaaaattgacctgaacgccgatctgggcgaaggctgcgccagcgacgcagagctattaacgctggtttcctctgccaatattgcctgtggatttcatgcaggcgatgcgcaaatcatgcaggcttgcgtgcgtgaagcaataaaaaatggtgtcgcgattggcgctcacccgagttttcccgacagggaaaattttggtcgcagcgccatgcagctgccgccagaaaccgtttacgcccagacgctgtatcaaattggcgcgctggcaacgattgcccgtgcgcaaggcggcgtaatgcgtcatgtcaaaccgcacggcatgttgtacaaccaggcggcgaaagaagcacaactggcagacgccatcgccagagcggtatacgcttgcgatccagcattgattctcgtcgggctggcgggaagcgagctgattcgtgcaggcaagcaatatggtctgacaacgcgcgaggaagtgtttgccgatcgcggttatcaggctgacggcagcctggtgccgcgaagccagagtggcgcgttgattgaaaacgaagaacaggcgctggcgcaaacgctggagatggtgcaacacggcagagtcaaaagtatcaccggcgaatgggcaacggtcgcggcgcaaacggtctgcctgcatggcgacggcgagcacgcactggcgttcgcccgccgactacgctctgcatttgccgaaaaggggattgttgtcgcagcataaccccgattaataaagaatgaaaaaaggatatcaccatgcctgaaggcccggagatccgccgtgcagcggataacctggaggcggcgatcaaaggcaaaccactaactgatgtctggtttgccttcccgcagttaaaaccttatcaaagtcaacttatcggtcaacacgttacccatgtggaaacgcgtggtaaggcgttgttaactcatttttccaacgacttaacgctctacagccataatcagctttacggcgtctggcgcgtggttgataccggcgaagagccgcagaccacgcgagtattgcgggtaaaactgcaaacggctgacaaaaccattctgctttatagcgccagcgatattgagatgttgaccccggaacaactgaccacgcatccgtttttacaacgcgttggtcccgatgtgctggatccgaatctgacgccggaggtggtgaaagaacgattattgagcccgcgctttcgtaaccgtcagtttgctggattactgctcgatcaggcgtttctggctgggcttggcaattatttgcgggtggagatcctctggcaggttgggttgactggaaatcataaagcgaaagatctcaatgcggcgcaactggatgcactcgcacacgcgttactggagattcctcgattttcctacgctacgcgggggcaggtggatgagaataagcatcatggggcgctgtttcgctttaaggtttttcatcgagatggcgaaccgtgcgaacgttgtggcagcatcattgagaaaaccacgctgagttctcgcccgttttactggtgccctggctgccagcattaagcgctccgcttcggcgcataggtactaataaaccgcgcaatggcaggccctgtcagcaaaatactgaacaggcgtagggtttgcatcgccataatgagcgccatatcggcattgctccctgcggcgatgaccgccacggtatcaagcccgccggggctggtggcgaggtaggcagtcataaaatcaatgtgcataaaccgggtcagcccccacgccatacccgcacaaatagccagcagagcaaaaatgctcagcaggatttgcggtagcgggcgtagtgcccgcagtaagatttgtttatcgaaaccaagaccaatccgccagccaattgccatatacgccatcgccagcagccattccggtagttcgatggtgatgagctgaccagactggagcactgcgcccgccagcatcgggatgagcatcgtgccggaaggaagacgcagcaggcatcccactgtaccggcaacgaccgcgagcaaaatagtaagcaggagattaatgctcactggcgggaaccagacgatatgctggttaaccgcttcagcgttatcgcccagcatcatgcgggtgaccagaacagcggcccccgcgacgaacagcactcgcagatattgcataaacgccaccaggcgaatatctgcgccgtaatcttgcgccatagcgaccattgccgccgcgccgccaggagaggagccccaggcaccggtatttccaggcaaactgctatagcgcaccaataaccaacccacaatggcgctggaaagcagcgttaccagtaaaattgcaagcacgatcggccagttgacggccagggtggtgagaatgctaccagtgaggttttgcgcaatcatgcagccaagaatggcctgggcggcgagaaaagcagagcggggaagttgcagagtaattccgcgcatactaaagatgatcccggcgatcatcggcccaagtaatagcgccgccgggagatgtaccgcgaggaaaccaatagaaaggagaagacttagcacacataacattccccactgcaaaactggcatccttcgctccctcattattttctctttggtgtatcgatacagcataaagaaagctgggccaggaaaaaataacagcaatcaaggaaaaggggaaaatcagcaattttctgaaagagatgccctttccggcggcaaagggcatcatggtaaatcagttatagttaatcttaaaaagcaccactgtatcgaaggggccagcctcgatgggggtgcctggaatggagctaagttcagccgtataggttttttcgtagaccaacatgtcactggtgaaatcggcgtattcagcatatttattgaaggtataagggctggcgttttcatccagtaaacgtagcttcagaccattaccaatcaacaatgctttatcttcttcaaccaacgtttcttcggtataaaaggaggaactgactttaaatccgtcggtgcattgatcgttttggctcttggtcgttttaatactgaacgttttgctcattgtgtggcgacgtatatccagcaaattaaatttaccaaaatcaatcacctgtgtttccggactaatggaaaaattgacgctgcaatccagcacgcgaatgttttccagaccagtaatatgatatttcaggttttgggcagtagggtcttcgttaacgctaccggcaccgtcaaattgcacgacgatatagtcgctaagcgtactttgataatcatgcggcggcatttctcgtattttgacgtataaccgcatgcgagcgagaaaggtacggctcatatgaatattagcgggatcgccgctgcaaattttgttctgccatcccatcgcgatgatctgctcaggggtataaatatcaatgttcttactgtcgatacactggttagtgtcgatgcgactttttcccagactggcatcgtaatcgacaccgttgtatgtcacgccgagttgataataacgatcctgcacccccggataggggtttacccaggcgtagacatgctcgctttcaaagttgccgttggtattgttgtcacaatagacgggaattttaatatcgtcagattcccagatcttatcaccgggtttggcattgcctggtacagcaaacggttgaatcgcttcacttttttctactgcgccaccagatgtaccaaaatagcagttcagcgccattgcagacttcaacggcagaaataacaggcagatgacgagcaacaatcccttgccagcactcatttcgcctccactgcttgtaaacggcattgtccgctgcagttgagcgtcgtcatgcgtaatgcgccgtaatcatccatgtaaccgagataaaactggctgccgctataacttccggtgtttgtgttgaccgtactaaaaggtgcaaccatcacggttttgaagcctgggagaacgcctttttcatttctccccagataggcaatggtcagataatacgcggtaggatttttcagtgtcagttggttgccctgctggctgacctgtaactgcagttcgaccttttctcctgctttcttgcgtaatgcagccggtcgccagaacaatttaatacgactttgaatagcgacctgaagtatcgcatggtcgctgcttttatccggagcgggaggaatttcgcgcatattgtagaaaaatagcgtttcgcgatcgccaggtaattgtgtggtactggcttgtttcacaacccgcacctggcttgtcgctttcggttccagacgttgaatagggggcaaagcgaccagaagagcatcgcttttctcccctttttcattttctatccaggaataagcaagataaggcagtttgtcactttggttttcgatacgcaggctggtggctttgtcattggcgttaaacacaatgcgtgtgcgatcgggttgcaccgcagcattgcaacccaagctgatggttaacaacattaagggtaatcctttaataaatgtcattctcttttccttaattaatgacaaggtaaaatcaggcgtttggtcgtgtcttccagacgttctggcagatgaataatgcagctttgctcaccccagaccacggtaaacagttgattttcagcgacaccgcttaaccaggcatgtccttcctcgccaaccatacccacgctaatgccgctgtcatcctggcggatatccgcaccgaggggagggaactgaccgctggcgttgcgtatgatgacgttaacgtctttaccggaacgggaagccagacttttgtaacctatcgcgccttcaatccatgtttccttgatgacgttttctgcaactgttacgccgtcgggtaagtcattcatgttcaccgccacggtggaaggctggtaactggaaatcaacggcaccaccgcaatgccaaaatggttggtgtagtcgagattgccctgaaccggaatatctgccacgccatcggtgctgaccatcaggcgtggttcattggtggagctgcggcgatgaaatgctgcaccatattgggttgcggtgaaagaaccgctccagctgctgctgacggaactgtaatcactggcggcataggtaccagaaatatcccactcacccgcactactcaggtgctgatagttaccgctcacctgggctccattgtccggacgatcggattgcagtccggcagacatgccccagctattacgttcatccagcgtatcgttccagctcatgcggtgtatggtgctgtggctactgttttgcatgtcatagccaacccgaccaccgttaccgaaggggaggctaatgctcagataaatctggttgtcgcgatctttatcttcgtagtgggtcgtattgaaactcgtgctaatgctgatatctctccagtcaccaatatcaacattaaaacctgctgtgatgttggcggtcgtggaggcgtctgcattccaccaggtttgatgtagcaggttggcgtaaagattgaggtttagtggggtaatcggttggcccacggataagctgatcgtctgtttttcgtcctgcgcatcgctgtcgttgtatttgtgatccagatagttggcgtagctgtgaaaatgacgatcactgaagcgataagcggcgaggctaatcgtgctgttggtggcatccacttgtttgctgtaattaaaacggtagcttaagccccgctcgtcctgctgagtatcaaaatggctactggcccaggtgacatcaaaggacagtgcgccaagccacagcatattttgcccgatacccattgcggcagaatggtagtcatcatcagaaatcagcaggccgccgtacaggctggtgttactgagcatcccccaggaaacttcattgctaaaaaaggtttcattttcagtttgatgactcatggaaggccgtggctgacccgcggccaatttatagcgaacctgtccctggcgagtcaggaagggcgtgcttgctgcgctaacctggaaattgttcacccgaccatcttcttccgtcactttgacatccagcgtgccctgaacagactgattgaggtcatcaataataaacgggcctggcgggacttttttctggtaaatgacgcggccactttgactgatcgtcaccgtggcattggtctgtgcaataccgctaatttgtggggcgtagccacgcagctcccacggtaacattcgatcgtcactcgccagtgccgcgccggtataagaaaaaccatcgaaaatattggaactgaaatcggtttcgccgagggttaacttagagcctaattgcggtaatggacgaaaaagataggtgcggcttattccgccactctggtcatggttatcttcgctatcggtcttattaagctggtaatcactgcgtaagcgccatgccccggcgttaattccggcggtaccgtaggcattcaggttagtgctgctgctgccgtcctgtgggcggtagctgctggcaaacaagttgtaatccatcaggacaccggcaacaccttctttccatgtagaggggggagcccagttttcactgtgccacgccagccaggcttgcggaatactaatattcagttgctgattggcttgatcgaaattgaagagcatttcaggtcgggaactgaaatcaatacaccgatctatctgtggcaaggactgacggacatctggttttaaaccaaatttatcgaccagactatcattgatgcatggaatggttttgtcaccctttttttgccagttaattttttgcccattactgattttgttgttattcaccgcaacgctaacaaaatattcaccgggagcaatgactcctttttcctttaataaactaatatcaatgcggtcgcgcatacttttatcgagaacattcagattgaattcgaccgccattgcgcaaggcatcgccatgaccaggcaggatacaaaagagagtcgataaatattcacggtgtccatacctgataaatattttatgaaaggcggcgatgatgccgccaaaataatacttatttataatccagcacgtaggttgcgttagcggttacttcacctgccgtgacatcgactgcattatcaatttgttccatccaggcgaaaaagttcagcgtctgttcactactgcttgcatccaggtcaagatctggcgcggcactacctaatacgatgttaccgtcatttttgtccatcagtcgtacaccgaccccagttgcttcgcctgcactggtgttgctcaacaaaggcgtagcaccagttgtcttagccgtgctatcgaaggttacgccaactttggataccggcattccgctaccgttgtcagaagcaggcagatcacagttgatcaagcgaatgtcgacggccactttattgctatgatgctcccggtttatatgggttgtcgtgacttgtccaagatctatgtttttatcaatatcttctggatgaatttcacaaggtgcttcaataacctcccccttaaagtgaatttcgccagaaccttcatcagcagcataaacaggtgcagtgaacagcagagatacggccagtgcggccaatgttttttgtcctttaaacataacagagtcctttaaggatatagaataggggtatagctacgccagaatatcgtatttgattattgctagtttttagttttgcttaaaaatattgttagttttattaaatgcaaaactaaattattggtatcatgaatttgttgtatgatgaataaaatataggggggtatagatagacgtcattttcatagggttataaatgcgactaccatgaagtttttaattgaaagtattgggttgctgataatttgagctgttctattctttttaaatatctatataggtctgttaatggattttatttttacaattttttgtgtttaggcatataaaaatcaacccgccatatgaacggcgggttaaaatatttacaacttagcaatcaaccattaacgcttgatatcgcttttaaagtcgcgtttttcatatcctgtatacagctgacgcggacgggcaatcttcataccgtcactgtgcatttcgctccagtgggcgatccagccaacggtacgtgccattgcgaaaatgacggtgaacatggaagacggaatacccatcgctttcaggatgataccagagtagaaatcgacgttcgggtacagtttcttctcgataaagtacgggtcgttcagcgcgatgttttccagctccatagccacttccagcaggtcatccttcgtgcccagctctttcagcacttcatggcaggtttcacgcattacggtggcgcgcgggtcgtaatttttgtacacgcggtgaccgaagcccatcaggcggaaagaatcatttttgtctttcgcacgacgaacaaattccggaatgtgtttaacggagctgatttcttccagcattttcagcgccgcttcgttagcaccgccgtgcgcaggtccccacagactagcaatacctgctgcgatacaggcaaacgggttcgcaccgctagagccagcggtacgcacggtggaggtagaggcgttctgttcatggtcagcgtgcaggatcagaatacggtccatagcacgttccagaatcggattaacttcatacggttcgcacggcgtggagaacatcatattcaggaagttaccggcgtaggagagatcgttgcgcgggtaaacaaatggctgaccaatggaatacttgtaacacatcgcggccatggtcggcattttgctcagcaggcggaacgcggcaatttcacggtgacgaggattgttaacatccaggctgtcgtgatagaacgccgccagcgcgccggtaataccacacatgactgccattggatggctgtcgcgacggaaagcatggaacagacgggtaatctgctcgtggatcatggtatgacgggtcaccgtagttttaaattcgtcatactgttcctgagtcggtttttcaccattcagcaggatgtaacaaacttccaggtagttagaatcggtcgccagctgatcgatcgggaaaccgcggtgcagcaaaataccttcatcaccatcaataaaagtaattttagattcgcaggatgcggtactagtgaagcctgggtcaaaggtgaacacacctttactaccgagagtacggatatcaataacatcttgacccagcgtgcctttcagcacatccagttcaacagctgtatccccgttgagggtgagttttgcttttgtatcagccatttaaggtctccttagcgccttattgcgtaagactgccggaacttaaatttgccttcgcacatcaacctggctttacccgttttttatttggctcgccgctctgtgaaagaggggaaaacctgggtacagagctctgggcgcttgcaggtaaaggatccattgatgacgaataaatggcgaatcaagtacttagcaatccgaattattaaacttgtctaccactaataactgtcccgaatgaattggtcaatacttccacactgttacataagttaatcttaggtgaaataccgacttcataacttttacgcattatatgcttttcctggtaatgtttgtaacaactttgttgaatgattgtcaaattagatgattaaaaattaaataaatgttgttatcgtgacctggatcactgttcaggataaaacccgacaaactatatgtaggttaattgtaatgattttgtgaacagcctatactgccgccaggtctccggaacaccctgcaatcccgagccacccagcgttgtaacgtgtcgttttcgcatctggaagcagtgttttgcatgacgcgcagttatagaaaggacgctgtctgacccgcaagcagaccggaggaaggaaatcccgacgtctccaggtaacagaaagttaacctctgtgcccgtagtccccagggaataataagaacagcatgtgggcgttattcatgataagaaatgtgaaaaaacaaagacctgttaatctggacctacagaccatccggttccccatcacggcgatagcgtccattctccatcgcgtttccggtgtgatcacctttgttgcagtgggcatcctgctgtggcttctgggtaccagcctctcttcccctgaaggtttcgagcaagcttccgcgattatgggcagcttcttcgtcaaatttatcatgtggggcatccttaccgctctggcgtatcacgtcgtcgtaggtattcgccacatgatgatggattttggctatctggaagaaacattcgaagcgggtaaacgctccgccaaaatctcctttgttattactgtcgtgcttagtcttctcgcaggagtcctcgtatggtaagcaacgcctccgcattaggacgcaatggcgtacatgatttcatcctcgttcgcgctaccgctatcgtcctgacgctctacatcatttatatggtcggttttttcgctaccagtggcgagctgacatatgaagtctggatcggtttcttcgcctctgcgttcaccaaagtgttcaccctgctggcgctgttttctatcttgatccatgcctggatcggcatgtggcaggtgttgaccgactacgttaaaccgctggctttgcgcctgatgctgcaactggtgattgtcgttgcactggtggtttacgtgatttatggattcgttgtggtgtggggtgtgtgatgaaattgccagtcagagaatttgatgcagttgtgattggtgccggtggcgcaggtatgcgcgcggcgctgcaaatttcccagagcggccagacctgtgcgctgctctctaaagtcttcccgacccgttcccataccgtttctgcgcaaggcggcattaccgttgcgctgggtaatacccatgaagataactgggaatggcatatgtacgacaccgtgaaagggagcgactatatcggtgaccaggacgcgattgaatatatgtgtaaaaccgggccggaagcgattctggaactcgaacacatgggcctgccgttcagccgtctcgatgatggtcgtatctatcaacgtccgtttggcggtcagagcaaaaacttcggcggcgagcaggcggcacgcactgcggcagcagctgaccgtaccggtcacgcactgttgcacacgctttatcagcagaacctgaaaaaccacaccaccattttctccgagtggtatgcgctggatctggtgaaaaaccaggatggcgcggtggtgggttgtaccgcactgtgcatcgaaaccggtgaagtggtttatttcaaagcccgcgctaccgtgctggcgactggcggagcagggcgtatttatcagtccaccaccaacgcccacattaacaccggcgacggtgtcggcatggctatccgtgccggcgtaccggtgcaggatatggaaatgtggcagttccacccgaccggcattgccggtgcgggcgtactggtcaccgaaggttgccgtggtgaaggcggttatctgctgaacaaacatggcgaacgttttatggagcgttatgcgccgaacgccaaagacctggcgggccgtgacgtggttgcgcgttccatcatgatcgaaatccgtgaaggtcgcggctgtgatggtccgtgggggccacacgcgaaactgaaactcgatcacctgggtaaagaagttctcgaatcccgtctgccgggtatcctggagctttcccgtaccttcgctcacgtcgatccggtgaaagagccgattccggttatcccaacctgtcactacatgatgggcggtattccgaccaaagttaccggtcaggcactgactgtgaatgagaaaggcgaagatgtggttgttccgggactgtttgccgttggtgaaatcgcttgtgtaagcgtacacggcgctaaccgtctgggcggcaacagcctgctggacctggtggtctttggtcgcgcggcaggtctgcatctgcaagagtctatcgccgagcagggcgcactgcgcgatgccagcgagtctgatgttgaagcgtctctggatcgcctgaaccgctggaacaataatcgtaacggtgaagatccggtggcgatccgtaaagcgctgcaagaatgtatgcagcataacttcagcgtcttccgtgaaggtgatgcgatggcgaaagggcttgagcagttgaaagtgatccgcgagcgtctgaaaaatgcccgtctggatgacacttccagcgagttcaacacccagcgcgttgagtgcctggaactggataacctgatggaaacggcgtatgcaacggctgtttctgccaacttccgtaccgaaagccgtggcgcgcatagccgcttcgacttcccggatcgtgatgatgaaaactggctgtgccactccctgtatctgccagagagcgaatccatgacgcgccgaagcgtcaacatggaaccgaaactgcgcccggcattcccgccgaagattcgtacttactaatgcggagacaggaaaatgagactcgagtttagtatttatcgctataacccggatgttgatgatgctccgcgtatgcaggattacaccctggaagcggatgaaggtcgcgacatgatgctgctggatgcgcttatccagctaaaagagaaagatcccagcctgagcttccgccgctcctgccgtgaaggtgtgtgcggttccgacggtctgaacatgaacggcaagaatggtctggcctgtattaccccgattagcgcactcaaccagccgggcaagaagattgtgattcgcccgctgccaggtttaccggtgatccgcgatttggtggtagacatgggacaattctatgcgcaatatgagaaaattaagccttacctgttgaataatggacaaaatccgccagctcgcgagcatttacagatgccagagcagcgcgaaaaactcgacgggctgtatgaatgtattctctgcgcatgttgtagtacctcttgtccgtctttctggtggaatcccgataagtttatcggcccggcaggcttgttagcggcatatcgtttcctgattgatagccgtgataccgagactgacagccgcctcgacggtttgagtgatgcattcagcgtattccgctgtcacagcatcatgaactgcgtcagtgtatgtccgaaggggctgaacccgacgcgcgccatcggccatatcaagagcatgttgttgcaacgtaatgcgtaaaccgtaggcctgataagacgcgcaagcgtcgcatcaggcaaccagtgccggatgcggcgtgaacgccttatccggcctacaagtcattacccgtaggcctgataagcgcagcgcatcaggcgtaacaaagaaatgcaggaaatctttaaaaactgcccctgacactaagacagtttttaaaggttccttcgcgagccactacgtagacaagagctcgcaagtgaaccccggcacgcacatcactgtgcgtggtagtatccacggcgaagtaagcataaaaaagatgcttaagggatcacgatgcagaacagcgctttgaaagcctggttggactcttcttacctctctggcgcaaaccagagctggatagaacagctctatgaagacttcttaaccgatcctgacagcgttgacgctaactggcgtaacacgttccagcagttacctggtacgggagtcaaaccggatcaattccactctcaaacgcgtgaatatttccgccgcctggcgaaagacgctagtcgttactctagtacgatctccgaccctgacaccaatgtgaagcaggttaaagtcctgcagctcattaacgcataccgcttccgtggtcaccagcatgcgaatctcgatccgctgggactgtggcagcaagataaagtggccgatctggatccgtctttccacgatctgaccgaagcagacttccaggagaccttcaacgtcggtagttttgccagcggcaaagaaaccatgaaactcggcgagctgctggaagccctcaagcaaacctactgcggcccgattggtgccgagtatatgcacattaccagcaccgaagaaaaacgctggatccaacagcgtatcgagtctggtcgcgcgactttcaatagcgaagagaaaaaacgcttcttaagcgaactgaccgccgctgaaggtcttgaacgttacctcggcgcaaaattccctggcgcaaaacgcttcagcctggaaggcggtgacgcgttaatcccgatgcttaaagagatgatccgccacgctggcaacagcggcacccgcgaagtggttctcgggatggcgcaccgtggtcgtctgaacgtgctggtgaacgtgctgggtaaaaaaccgcaagacttgttcgacgagttcgccggtaaacataaagaacacctcggcacgggtgacgtgaaataccacatgggcttcagctctgacttccagaccgatggcggcctggtgcacctggcgctggcgtttaacccgtctcaccttgagattgtaagcccggtagttatcggttctgttcgtgcccgtctggacagacttgatgagccgagcagcaacaaagtgctgccaatcaccatccacggtgacgccgcagtgaccgggcagggcgtggttcaggaaaccctgaacatgagcaaagcgcgtggttatgaagttggcggtacggtacgtatcgttatcaacaaccaggttggtttcaccacctctaatccgctggatgcccgttctacgccgtactgtactgatatcggtaagatggttcaggccccgattttccacgttaacgcggacgatccggaagccgttgcctttgtgacccgtctggcgctcgatttccgtaacacctttaaacgtgatgtcttcatcgacctggtgtgctaccgccgtcacggccacaacgaagccgacgagccgagcgcaacccagccgctgatgtatcagaaaatcaaaaaacatccgacaccgcgcaaaatctacgctgacaagctggagcaggaaaaagtggcgacgctggaagatgccaccgagatggttaacctgtaccgcgatgcgctggatgctggcgattgcgtagtggcagagtggcgtccgatgaacatgcactctttcacctggagcccgtacctcaaccacgaatgggacgaagagtacccgaacaaagttgagatgaagcgcctgcaggagctggcgaaacgcatcagcacggtgccggaagcagttgaaatgcagtctcgcgttgccaagatttatggcgatcgccaggcgatggctgccggtgagaaactgttcgactggggcggtgcggaaaacctcgcttacgccacgctggttgatgaaggcattccggttcgcctgagcggtgaagactccggtcgcggtaccttcttccaccgccacgcggtgatccacaaccagtctaacggttccacttacacgccgctgcaacatatccataacgggcagggcgcgttccgtgtctgggactccgtactgtctgaagaagcagtgctggcgtttgaatatggttatgccaccgcagaaccacgcactctgaccatctgggaagcgcagttcggtgacttcgccaacggtgcgcaggtggttatcgaccagttcatctcctctggcgaacagaaatggggccggatgtgtggtctggtgatgttgctgccgcacggttacgaagggcaggggccggagcactcctccgcgcgtctggaacgttatctgcaactttgtgctgagcaaaacatgcaggtttgcgtaccgtctaccccggcacaggtttaccacatgctgcgtcgtcaggcgctgcgcgggatgcgtcgtccgctggtcgtgatgagcccgaaatccctgctgcgtcatccgctggcggtttccagcctcgaagaactggcgaacggcaccttcctgccagccatcggtgaaatcgacgagcttgatccgaagggcgtgaagcgcgtagtgatgtgttctggtaaggtttattacgacctgctggaacagcgtcgtaagaacaatcaacacgatgtcgccattgtgcgtatcgagcaactctacccgttcccgcataaagcgatgcaggaagtgttgcagcagtttgctcacgtcaaggattttgtctggtgccaggaagagccgctcaaccagggcgcatggtactgcagccagcatcatttccgtgaagtgattccgtttggggcttctctgcgttatgcaggccgcccggcctccgcctctccggcggtagggtatatgtccgttcaccagaaacagcaacaagatctggttaatgacgcgctgaacgtcgaataaataaaggatacacaatgagtagcgtagatattctggtccctgacctgcctgaatccgtagccgatgccaccgtcgcaacctggcataaaaaacccggcgacgcagtcgtacgtgatgaagtgctggtagaaatcgaaactgacaaagtggtactggaagtaccggcaagtgcagacggcattctggatgcggttctggaagatgaaggtacaacggtaacgtctcgtcagatccttggtcgcctgcgtgaaggcaacagcgccggtaaagaaaccagcgccaaatctgaagagaaagcgtccactccggcgcaacgccagcaggcgtctctggaagagcaaaacaacgatgcgttaagcccggcgatccgtcgcctgctggctgaacacaatctcgacgccagcgccattaaaggcaccggtgtgggtggtcgtctgactcgtgaagatgtggaaaaacatctggcgaaagccccggcgaaagagtctgctccggcagcggctgctccggcggcgcaaccggctctggctgcacgtagtgaaaaacgtgtcccgatgactcgcctgcgtaagcgtgtggcagagcgtctgctggaagcgaaaaactccaccgccatgctgaccacgttcaacgaagtcaacatgaagccgattatggatctgcgtaagcagtacggtgaagcgtttgaaaaacgccacggcatccgtctgggctttatgtccttctacgtgaaagcggtggttgaagccctgaaacgttacccggaagtgaacgcttctatcgacggcgatgacgtggtttaccacaactatttcgacgtcagcatggcggtttctacgccgcgcggcctggtgacgccggttctgcgtgatgtcgataccctcggcatggcagacatcgagaagaaaatcaaagagctggcagtcaaaggccgtgacggcaagctgaccgttgaagatctgaccggtggtaacttcaccatcaccaacggtggtgtgttcggttccctgatgtctacgccgatcatcaacccgccgcagagcgcaattctgggtatgcacgctatcaaagatcgtccgatggcggtgaatggtcaggttgagatcctgccgatgatgtacctggcgctgtcctacgatcaccgtctgatcgatggtcgcgaatccgtgggcttcctggtaacgatcaaagagttgctggaagatccgacgcgtctgctgctggacgtgtaatagtttaagtttcacctgcactgtagaccggataaggcattatcgccttctccggcaattgaagcctgatgcgacgctgacgcgtcttatcaggcctacgggaccaccaatgtaggtcggataaggcgcaagcgccgcatccgacaagcgatgcctgatgtgacgtttaacgtgtcttatcaggcctacgggtgaccgacaatgcccggaagcgatacgaaatattcggtctacggtttaaaagataacgattactgaaggatggacagaacacatgaacttacatgaatatcaggcaaaacaactttttgcccgctatggcttaccagcaccggtgggttatgcctgtactactccgcgcgaagcagaagaagccgctagtaaaatcggtgccggtccgtgggtagtgaaatgtcaggttcacgctggtggccgcggtaaagcgggcggtgtgaaagttgtaaacagcaaagaagacatccgtgcttttgcagaaaactggctgggcaagcgtctggtaacgtatcaaacagatgccaatggccaaccggttaaccagattctggttgaagcagcgaccgatatcgctaaagagctgtatctcggtgccgttgttgaccgtagttcccgtcgtgtggtctttatggcctccaccgaaggcggcgtggaaatcgaaaaagtggcggaagaaactccgcacctgatccataaagttgcgcttgatccgctgactggcccgatgccgtatcagggacgcgagctggcgttcaaactgggtctggaaggtaaactggttcagcagttcaccaaaatcttcatgggcctggcgaccattttcctggagcgcgacctggcgttgatcgaaatcaacccgctggtcatcaccaaacagggcgatctgatttgcctcgacggcaaactgggcgctgacggcaacgcactgttccgccagcctgatctgcgcgaaatgcgtgaccagagccaggaagatccgcgtgaagcacaggctgcacagtgggaactgaactacgttgcgctggacggtaacatcggttgtatggttaacggcgcaggtctggcgatgggtacgatggacatcgttaaactgcacggcggcgaaccggctaacttccttgacgttggcggcggcgcaaccaaagaacgtgtaaccgaagcgttcaaaatcatcctctctgacgacaaagtgaaagccgttctggttaacatcttcggcggtatcgttcgttgcgacctgatcgctgacggtatcatcggcgcggtagcagaagtgggtgttaacgtaccggtcgtggtacgtctggaaggtaacaacgccgaactcggcgcgaagaaactggctgacagcggcctgaatattattgcagcaaaaggtctgacggatgcagctcagcaggttgttgccgcagtggaggggaaataatgtccattttaatcgataaaaacaccaaggttatctgccagggctttaccggtagccaggggactttccacagtgaacaggccattgcatacggcactaaaatggttggcggcgtaaccccaggtaaaggcggcaccacccacctcggcctgccggtgttcaacaccgtgcgtgaagccgttgctgccactggcgctaccgcttctgttatctacgtaccagcaccgttctgcaaagactccattctggaagccatcgacgcaggcatcaaactgattatcaccatcactgaaggcatcccgacgctggatatgctgaccgtgaaagtgaagctggatgaagcaggcgttcgtatgatcggcccgaactgcccaggcgttatcactccgggtgaatgcaaaatcggtatccagcctggtcacattcacaaaccgggtaaagtgggtatcgtttcccgttccggtacactgacctatgaagcggttaaacagaccacggattacggtttcggtcagagcacctgtgtcggtatcggcggtgacccgatcccgggctctaactttatcgacattctcgaaatgttcgaaaaagatccgcagaccgaagcgatcgtgatgatcggtgagatcggcggtagcgctgaagaagaagcagctgcgtacatcaaagagcacgttaccaagccagttgtgggttacatcgctggtgtgactgcgccgaaaggcaaacgtatgggccacgcgggtgccatcattgccggtgggaaagggactgcggatgagaaattcgctgctctggaagccgcaggcgtgaaaaccgttcgcagcctggcggatatcggtgaagcactgaaaactgttctgaaataaatatctgtaataagaaatagccctcgccgcttccctctacaggaatggcgaagggctgtcggtttcgacatggttggccatcgtatgatggccttttttgtgcttatcggctactttttcgctgcgctatcagggtaaatttatagtcatcggtattaaaagcgttgcggctatattcaaacacccgaccatcaactaaatatccacggcttactttttcaagaatcggctttgtctggctgatattaagcagacggctcatctcttcggttggcatcagaggaatgatttcctgttcgctacgatcgataaccattttcttcacttcttcgataaagtgatatttgctattttccatgacctgccaggtgagatccgggaacaacgcaagcggcatccaggtttcttccagcgccattggcttttgcttgcgatagcgcacgcgcttcacatgccacacacgatcctgcggggtgatttgtagctgttgctgaagaaaatcgtcagccggaatcacttcgaatatcagaacttcactgtgtgtatcgacgtgacggtcgctcagtttttcatcaaaactggttaactgaaaaatatcgtaattgacccgctcttctttgacgtaagtcccgctgccctgaatgctttcgaggatctgctgctcgactagctggcgcaaagcctgacgcaccgtaacccggctgacgccaaactctgtttgtagcgcactttcagtgggtaacgcatcgccaggtttaagctcgccacgcgcaatttgttcacgaatgcgatcggcaatctgccggtataagggcttgtgtcccatttttagtatctcattaatacgaatttaaccattatgcccgataaattcatcctgtaaataatacaaatacaatacaaataatttcaatcaagtgaaattgatcacataatggtattgttttatcgggcacactggcgcgactataaaaacgatcaagtgaggatcatgatgaatctgacgactctgacccaccgcgatgcgttgtgtctgaatgcgcgctttaccagccgtgaagaggccatccacgcgttgactcaacgtcttgctgctctggggaaaatttccagtactgagcaatttctggaagaagtgtatcgccgtgaaagccttggcccgaccgccttaggtgaagggttggctgtgccgcatggcaaaactgctgcggtaaaagaagcggcgtttgcggtcgccacactcagcgagccgcttcagtgggaaggcgttgatggcccggaagcagttgatttagtggtgctgctggcgattccccccaatgaagcgggtactacgcatatgcaactgctgacagcgctgaccacgcgccttgcggatgatgagattcgggcgcgtatacagagcgcgacgacgcctgatgagttgctcagcgcgctggatgacaagggaggcacgcaaccttctgcctctttttccaacgcgccaactatcgtctgcgtaacggcctgtccggcgggtattgctcacacctatatggctgcggaatatctggaaaaagccggacgcaaactcggcgtaaatgtttacgttgaaaaacaaggcgctaacggcattgaagggcgtttaacggcggatcaactcaatagtgcaaccgcctgtatttttgcggctgaagtcgccatcaaggagagtgagcgttttaatggcattcccgcgcttagtgtgcctgttgccgagccgattcgccatgcagaagcgttgatccaacaagcgcttaccctcaagcgtagcgatgagacgcgtaccgtacagcaagatacgcaaccggtgaaaagtgtcaaaacggagctgaaacaggcactgttgagcggaatctcttttgccgtaccgttgattgtcgcggggggcacggtgctggcggtcgcggtattactgagccaaatcttcgggctacaagatctgtttaatgaagaaaactcctggctgtggatgtaccgcaagctgggcggcgggctgctcggaattttgatggtaccggtgctcgcggcctataccgcctattctctggcagataaaccggcgttagcgccaggctttgcggctggacttgccgccaacatgatcggctccgggtttctcggcgcggtcgttggcggattgatagccggttacttgatgcgctgggtgaaaaatcacttgcgtcttagcagtaaattcaatggattcctgactttttatctctacccggtgctcggtacgttgggagcgggcagtctgatgctgtttgtggtgggggaacctgtcgcctggatcaataacagccttaccgcctggctgaacggtctgagtggaagtaacgcgctgttgctgggtgccattctcggttttatgtgttcctttgaccttggagggccagtgaataaagccgcttatgcattctgcctgggcgcaatggcgaacggcgtttacggcccgtatgccattttcgcctccgtcaaaatggttagcgcatttaccgtaaccgcttccacgatgctcgcaccgcgcctgtttaaagagtttgaaattgagaccgggaaatccacctggctgttagggctggcaggtattaccgaaggggcgatcccgatggcgattgaagatccgctgcgggttattggtagctttgtgctgggctctatggtaacgggcgctattgtcggtgcgatgaatatcggccttagcacacccggtgccggcattttcagcctctttttacttcatgataatggcgcgggcggtgttatggcggcaattggctggtttggcgcggcattggtgggggctgcaatcagcactgcaattctcctgatgtggcggcgtcacgcggttaagcatggcaactatctgactgatggcgtaatgccataaacaaaaaggaaacgacgatgaaagcagtatctcgcgttcacatcaccccgcatatgcactgggatcgagagtggtatttcaccaccgaagagagtcgtattctgctggtcaataatatggaagagatcctgtgccgactggaacaggacaacgaatacaaatattacgtactcgacgggcaaacggcgatcctcgaagattatttcgcggtgaaaccggaaaacaaagaccgtgtgaagaaacaggtagaagccggcaagttgattatcggcccctggtatacccagaccgataccacgattgtttctgcggaatccatcgtccgtaatctgatgtacggaatgcgtgactgcctcgcgtttggcgagccgatgaaaataggttatttaccagattcctttggcatgtccgggcaactgccgcatatctacaatggatttggcattacccgcaccatgttctggcgcggatgtagcgagcgccacggtactgataaaaccgagtttttgtggcaaagcagtgacggtagcgaagtgacggcgcaggtgctgccgctgggctacgccatcggtaagtacttacctgccgacgaaaacggattacgtaaacgcctcgacagttattttgacgtgctggaaaaagcgtctgtaaccaaagagattttgctgccgaatgggcatgaccagatgccattgcagcaaaatatcttcgaagtgatggataagctacgtgagatctaccctcaacgtaagtttgtgatgagccgctttgaagaggtatttgagaagatcgaagcgcagcgagataatctggcaaccctgaaaggggaatttattgatggcaaatatatgcgcgtgcatcgcaccatcggttctacgcgtatggatatcaaaattgcccacgcgcgtattgaaaataagattgttaatctgctggaaccgctggcaacactggcctggacgttgggttttgaataccaccacggcttgctggagaaaatgtggaaagagatcttaaaaaatcatgcccacgacagtatcggctgctgctgtagtgacaaagttcatcgcgaaatcgtcgcccgcttcgaactggctgaagacatggcggataatctgattcgtttctacatgcgcaaaattgccgacaacatgccgcagagcgacgccgacaaactcgtcctgtttaacctgatgccctggccgcgtgaagaagttatcaacaccactgtgcggctgcgcgccagccagtttaatttgcgggacgatcgcggtcagcctgtaccgtattttattcgccatgcccgtgagatcgatccaggcctaatcgatcggcaaatagttcattacggtaattacgatccctttatggagtttgatatacagatcaaccagattgtcccttctatgggctatcgcacgctttatatcgaagcgaatcagcctggcaacgtaattgcggcaaaaagtgacgctgaagggatactggaaaatgctttctggcaaattgcgctcaatgaggatggttctctgcaactggtagataaagacagcggtgtgcgctatgaccgggtattgcaaattgaagaaagctctgatgatggtgatgaatatgactatagtcccgcaaaagaagagtgggtaattaccgcagcgaacgcgaaaccgcaatgcgatattattcatgaagcctggcagagcagggctgttatccgctatgacatggcagtgccgctcaatttgagtgaacgcagcgcccggcaatccactggcagagtaggggtggtgttggttgtcactcttagtcataacagcaggcgtattgatgtggatatcaatcttgataaccaggctgacgatcatcgccttcgtgtcctggtccctacaccttttaacaccgacagtgttctggcagatacgcagtttggtagcctaacgcgccccgtgaacgacagtgcaatgaacaactggcagcaagaaggctggaaagaagcgccggttccggtatggaatatgctcaactatgttgccttacaggaagggcgtaacggcatggctgtctttagcgaagggttacgtgaatttgaagtcatcggtgaagagaagaaaacctttgccattacgttgctgcgtggcgtgggcttactgggcaaagaagatctgcttttaaggcctgggcggcctagcggaattaaaatgccagtcccggacagtcaactacgtggtctgctttcttgtcgcctaagtttattgagttataccggtacgccaaccgccgctggtgtagctcagcaggcgcgagcatggctgactccagtacagtgttacaacaaaatcccatgggatgtgatgaagctcaacaaagccggattcaacgtgccggaaagttatagtttgttgaaaatgcccccagtgggatgcctgataagcgcacttaagaaagctgaagaccgacaagaagtgattttacggctgtttaatccggctgaaagtgcaacctgtgatgcgactgttgctttcagtcgcgaggtgatttcttgcagtgaaacgatgatggatgaacacattaccaccgaggaaaatcaaggtagtaatctaagcgggccttttttacccggccagagtcggacgttcagttaccggcttgcctgaatagcaatcaaaccgaagccacatatgcgcggccagattgttgacaaagggcgctttgttcatgccggatacggcatgaacgctttattcggtctacaaaagcaggcaaattcaatatattgcagagatgatgtagacactggcaagcgtagcgcatcaggtaattttgcgtttatcttcactctcaagccacgtatatgtggctttatttttaacaaaataataaccctgggtgagttaattataatataattataagttaactaaatgttaatattggcggggtggatttatgcctttattagtaatcctgaaactctgcgtcgtattagccagtgaccaaaaaaagaattaaggtcaaccgtgctgtttttgcttcgtctctttttatctttaattgccaaccgaaactaatttcagccttataactcacacattttaaacataaatgtcactaaagttaccttattgaaacatgattaacataatttgtaggaattgatatttatcaatgtataagtcttggaaatgggcatcaaaaagagataaattgttctcgatcaaattggctgaaaggcggtaatttagctataaattgatcaccgtcgaaaaatgcaaatttgcttcaacaaaaacctgtttattgtaaggattttgcggcgtaatatatacgtgggatcaatttgagtttttattaacatgtttgcaacctttctttacgccgtttttgtgtgcattcacatggtatgatgaaagtgttcaaacaaatttctattggggcatgcgtgtgaccctttctaacggggttcactctcggagtcttcatgcgatgagcaaggagtcatgatgttagatatagtcgaactgagccgcttacagtttgccttgaccgcgatgtaccacttcctttttgtgccactgacgctcggtatggcgttcctgctggccattatggaaacggtctacgtcctctccggcaaacagatttataaagatatgaccaagttctggggcaagttgtttggtatcaacttcgctctgggtgtggctaccggtctgaccatggagttccagttcgggactaactggtcttactattcccactatgtaggggatatcttcggtgcgccgctggcaatcgaaggtctgatggccttcttcctcgaatccacctttgtaggtctgttcttcttcggttgggatcgtctgggtaaagttcagcatatgtgtgtcacctggctggtggcgctcggtagtaacctgtccgcactgtggattctggttgcgaacggctggatgcaaaacccaatcgcgtccgatttcaactttgaaactatgcgtatggagatggtgagcttctccgagctggtgcttaacccggttgctcaggtgaaattcgttcacactgtagcgtctggttatgtgactggcgcgatgttcatcctcggtatcagcgcatggtatatgctgaaaggtcgtgacttcgccttcgctaaacgctcctttgctatcgctgccagcttcggtatggctgctgttctgtctgttattgttctgggtgatgaatccggctacgaaatgggcgacgtgcagaaaaccaaactggctgctattgaagccgagtgggaaacgcaacctgcgcctgctgcctttactctgttcggcattcctgatcaggaagaggagacgaacaaatttgcgattcagatcccttacgcactgggcatcattgcaacgcgttccgtggataccccggttatcggcctgaaagagctgatggtgcagcatgaagaacgcattcgtaacgggatgaaggcgtactctctgctcgaacaactgcgttctggttctaccgaccaggcggttcgtgaccagttcaatagcatgaagaaagacctcggttacggtctgctgctgaaacgctatacgccaaacgtggctgatgcgactgaagcgcagattcaacaggcaaccaaagactccatcccgcgtgtagcgccgctgtactttgcgttccgtatcatggtggcgtgtggcttcctgcttctggcaatcatcgcgctctctttctggagtgtcatccgcaaccgcattggcgagaaaaaatggcttctgcgcgccgcgctgtacggtattccgctgccgtggattgctgtagaagcgggctggttcgtggctgaatatggccgccaaccgtgggctatcggtgaagtgctgccgacagctgtggcgaacagcagtctgaccgcaggcgatctcatcttcagtatggtgctgatttgcggcctgtataccctgttcctggtggcagaattgttcttaatgttcaagtttgcacgcctcggcccaagcagcctgaaaaccggtcgctatcactttgagcagtcttccacgactactcagccggcacgctaagacaggagtcgtcaaatgatcgattatgaagtattgcgttttatctggtggctgctggttggcgttctgctgattggttttgcagtcactgacggtttcgacatgggggtgggcatgctcacccgtttcctcggtcgtaacgacaccgagcgtcgaattatgattaactccattgcaccacactgggacggtaaccaggtttggctgatcaccgcgggcggcgcactctttgctgcctggccgatggtctatgccgctgcgttctccggcttctatgtggcgatgatcctcgtgctggcgtctttgttcttccgtccggtcggttttgactaccgctccaagattgaagaaacccgctggcgtaacatgtgggactggggcatcttcattggtagcttcgttccgccgctggtaattggtgtagcgttcggtaacctgttgcagggcgtaccgttcaacgttgatgaatatctgcgtctgtactacaccggtaacttcttccagttgcttaacccgttcggcctgctggcaggcgtggtgagcgtagggatgatcattactcagggcgcaacctatctgcaaatgcgtaccgtgggcgaactgcacctgcgtacccgtgcaacggctcaggtggctgcgctggtgacactggtctgtttcgcactggctggcgtatgggtgatgtacggtatcgatggttatgtcgtgaaaagcacaatggaccattacgcagcctctaacccactgaataaagaagtggttcgtgaagctggcgcatggctggttaacttcaacaacacgccaattctgtgggctattccggcactgggtgtggttctgccgctgctgaccatcctgactgcacgtatggataaagccgcgtgggcgtttgtgttctcctccctgacgctggcctgcatcatcctgacagccggtatcgcaatgttcccgtttgtgatgccgtccagcaccatgatgaacgcaagtctgacaatgtgggatgcaacttccagccagctgacgcttaacgtcatgacctgggttgcggtggttctggtaccgatcattctgctctacaccgcctggtgttactggaaaatgttcggtcgtatcaccaaagaagatattgaacgtaacacccactctctgtactaagtaaggagctaaaaatgtggtatttcgcatggattctgggaacgcttcttgcctgtagctttggggtaatcaccgcgctggcgcttgaacacgtcgaaagtggcaaagccggtcaagaagacatctgatgagtaagattatcgcgactttgtatgcggtaatggacaagcgccccctgcgggcgctttccttcgtgatggcgcttctgttagcaggatgtatgttttgggacccatctcgttttgccgcgaagaccagtgaactggaaatctggcatggtttattgctgatgtgggccgtctgtgctggtgtgattcacggcgtgggctttcgtccgcagaaggttctttggcaagggattttttgcccattgcttgccgatattgttctcattgtcgggctgattttcttcttcttttaaatcagaattctctttaaaaaattatgggccgctccaggcccataaatttttacgctcccttaacttgccctcattcccaaacctcaatcgcgcgcgtatagtagcagcgtttaaaagctctaacttttgttgcattaccgggatgtaaagtgaatacaacgctgtttcgatggccggttcgcgtctactatgaagataccgatgccggtggtgtggtgtaccacgccagttacgtcgctttttatgaaagagcacgcacagagatgctgcgtcatcatcacttcagtcagcaggcgctgatggctgaacgcgttgcctttgtggtacgtaaaatgacggtggaatattacgcacctgcgcggctcgacgatatgctcgaaatacagactgaaataacaagtatgcgtggcacctctttggttttcacgcaacgtattgtcaacgccgagaatactttgctgaatgaagcagaggttctggttgtttgcgttgacccactcaaaatgaagcctcgtgcgcttcccaagtctattgtcgcggagtttaagcagtgactgacatgaatatccttgatttgttcctgaaggctagccttctggttaaacttatcatgttgattttgattggttttagtatcgcatcttgggccattattatccagcggacccgtattcttaacgcagcggcgcgcgaagccgaagcgtttgaagataaattctggtctggaatcgaactctctcgcctctatcaagagagccaggggaaacgggataatctgactggtagcgaacaaatcttttacagcgggttcaaagagtttgtgcgcctgcatcgtgccaatagccatgcgccggaagccgtagtggaaggggcgagccgtgctatgcgtatctccatgaaccgtgaacttgaaaatctggaaacgcacattccgttcctcggtacggttggctccatcagcccgtatattggtctgtttggtacggtctgggggatcatgcacgcctttatcgccctcggggcggtaaaacaagcaacactgcaaatggttgcgcccggtatcgcagaagcgttgattgcgactgcaattggtctgtttgccgctatcccggcagttatggcctacaaccgcctcaaccagcgcgtaaacaaactggaactgaattacgacaactttatggaagagtttaccgcgattctgcaccgccaggcgtttaccgttagcgagagcaacaaggggtaagccatggccagagcgcgtggacgaggtcgtcgcgatctcaagtccgaaatcaacattgtaccgttgctggacgtactgctggtgctgttgctgatctttatggcgacagcgcccatcatcacccagagcgtggaggtcgatctgccagacgctactgaaagtcaggcggtgagcagtaacgataatccgccagtgattgttgaagtgtctggtattggtcagtacaccgtggtggttgagaaagatcgcctggagcgtttaccaccagagcaggtggtggcggaagtgtccagccgtttcaaggccaacccgaaaacggtctttctgatcggtggcgcaaaagatgtgccttacgatgaaataattaaagcactgaacttgttacatagtgcgggtgtgaaaagcgttggtttaatgacgcagcctatctaaacatctgcgtttcccttgcttgaaagagagcgggtaacaggcgaacagtttttggaaaccgagagtgagtaaggcaaccgaacaaaacgacaagctcaagcgggcgataattattagtgcagtgctgcatgtcatcttatttgcggcgctgatctggagtagcttcgatgagaatatagaagctagtgccggaggcggcggtggtagctccatcgacgctgtcttggttgatagtggtgcggtagttgagcagtacaaacgcatgcaaagccaggaaagtagcgcgaagcgttctgatgaacagcgcaagatgaaggaacagcaggctgctgaagaactgcgtgagaaacaagcggctgaacaggaacgcctgaagcaacttgagaaagagcggttagcggctcaggagcagaaaaagcaggctgaagaagccgcaaaacaggccgagttaaagcagaagcaagctgaagaggcggcagcgaaagcggcggcagatgctaaagcgaaggccgaagcagatgctaaagctgcggaagaagcagcgaagaaagcggctgcagacgcaaagaaaaaagcagaagcagaagccgccaaagccgcagccgaagcgcagaaaaaagccgaggcagccgctgcggcactgaagaagaaagcggaagcggcagaagcagctgcagctgaagcaagaaagaaagcggcaactgaagctgctgaaaaagccaaagcagaagctgagaagaaagcggctgctgaaaaggctgcagctgataagaaagcggcagcagagaaagctgcagccgacaaaaaagcagcagaaaaagcggctgctgaaaaggcagcagctgataagaaagcagcggcagaaaaagccgccgcagacaaaaaagcggcagcggcaaaagctgcagctgaaaaagccgctgcagcaaaagcggccgcagaggcagatgatattttcggtgagctaagctctggtaagaatgcaccgaaaacggggggaggggcgaaagggaacaatgctagccctgccgggagtggtaatactaaaaacaatggcgcaagtggggccgatatcaataactatgccgggcagattaaatctgctatcgaaagtaagttctatgacgcaagctcctatgcaggcaaaacctgtacgctgcgcataaaactggcacccgatggtatgttactggatatcaaacctgaaggtggcgatcccgcactttgtcaggctgcgttggcagcagctaaacttgcgaagatcccgaaaccaccaagccaggcagtatatgaagtgttcaaaaacgcgccattggacttcaaaccgtaatcgcgatgttgactgttcggacggtcaacatcaggcaccggttgccacggggttctggtagttttgtgtattttagtttgttaacattctgctaaattatcgtgggccatcggtccagataagggagatatgatgaagcaggcattacgagtagcatttggttttctcatactgtgggcaagtgttctgcatgctgaagtccgcattgtgatcgacagcggtgtagattccggtcgtcctattggtgttgttcctttccagtgggcggggcctggtgcggcacctgaagatattggcggcatcgttgctgctgacttgcgtaacagcggtaaatttaatccgttagatcgcgctcgtctgccacagcagccgggtagtgcgcaggaagtacaaccagctgcatggtccgcactgggcattgacgctgtagttgtcggtcaggtcactccgaatccggatggttcttacaatgttgcttatcaacttgttgacactggcggcgcaccgggtactgtacttgctcagaacagctacaaagtgaacaagcagtggctgcgttatgctggtcataccgccagtgatgaagtgtttgaaaaactgaccggcattaaaggtgcgttccgtactcgtattgcctacgttgttcagaccaacggcggtcagttcccgtatgaactgcgcgtatctgactatgacggttacaaccagtttgtcgttcaccgtagtccgcagccgctgatgtctccggcgtggagtccagacggttctaaactggcttatgtgaccttcgaaagcggtcgttccgcgctggttattcagacgctggcaaatggcgctgtacgtcaggtggctagtttcccgcgtcacaacggtgcacctgcattcagcccagacggcagcaaactggcattcgccttgagcaaaaccggtagtctgaacctgtacgtaatggatttggcttctggtcagatccgccaggtgactgatggtcgcagtaacaataccgaaccgacctggttcccggatagccagaacctggcatttacttctgaccaggccggtcgtccgcaggtttataaagtgaatatcaacggcggtgcgccacaacgtattacctgggaaggtagccagaaccaggatgcggatgtcagcagcgacggtaaatttatggtaatggtcagctccaatggtgggcagcagcacattgccaaacaagatctggcaacgggaggcgtacaagttctgagctccacgttcctggatgaaacgccaagtctggcacctaacggcactatggtaatctacagctcttctcaggggatgggatccgtgctgaatttggtttctacagatgggcgtttcaaagcgcgtcttccggcaactgatggacaggtcaaattccctgcctggagcccgtatctgtgataataattaattgaatagtaaaggaatcattgaaatgcaactgaacaaagtgctgaaagggctgatgattgctctgcctgttatggcaattgcggcatgttcttccaacaagaacgccagcaatgacggcagcgaaggcatgctgggtgccggcactggtatggatgcgaacggcggcaacggcaacatgtcttccgaagagcaggctcgtctgcaaatgcaacagctgcagcagaacaacatcgtttacttcgatctggacaagtacgatatccgttctgacttcgctcaaatgctggatgcacatgcaaacttcctgcgtagcaacccgtcttacaaagtcaccgtagaaggtcacgcggacgaacgtggtactccggaatacaacatctccctgggtgaacgtcgtgcgaacgccgttaagatgtacctgcagggtaaaggcgtttctgcagaccagatctccatcgtttcttacggtaaagaaaaacctgcagtactgggtcatgacgaagcggcatactccaaaaaccgtcgtgcggtactggtttactaagagaattgcatgagcagtaacttcagacatcaactattgagtctgagcttactggttggtatagcggccccctgggccgcttttgctcaggcaccaatcagtagtgtcggcagtggcagcgtcgaagaccgcgtcactcaacttgagcgtatttctaatgctcacagccagcttttaacccaactccagcaacaactttctgataatcaatccgatattgattccctgcgtggtcagattcaggaaaatcagtatcaactgaatcaggtcgtggagcggcaaaagcagatcctgttgcagatcgacagcctcagcagcggtggtgcagcggcgcaaagtaccagcggcgatcaaagcggtgcggcggcaagtacgacgccgacagctgatgctggtactgcgaatgctggcgcgccggtgaaaagcggtaatgcaaacacggattacaatgcagctattgcgctggtgcaggataaatcccgccaggatgacgcaatggtggcatttcagaatttcatcaaaaattaccctgatagtacttacctgccaaacgccaattattggctgggtcagttaaactacaacaagggtaaaaaagatgatgcggcgtactattttgctagcgtagtgaaaaactatccgaagagtccaaaggctgcagatgcgatgtttaaagtcggcgtcatcatgcaggacaaaggtgacaccgcaaaagcgaaagccgtataccagcaggttatcagtaaataccctggtactgatggcgctaaacaggcacaaaaacgtctgaacgcgatgtaatgcataacacacgaccagaagtcgcattatttctggtcgtgtcgtgcgaatcataagcagttgagtgatctacatcgaaatttttgttgcgctcaagtctgaaatcagtaatatatgccgccgttgccacgggatatcaaacaaaccgaaagcaacgaaaaagtgggtcgttagctcagttggtagagcagttgacttttaatcaattggtcgcaggttcgaatcctgcacgacccaccaatcgctaaggtggaagcggtagtaaaacgtgaaggataacgttgcatgagcaacggcccgaagggcgagacgaagtcgagtcatcctgcacgacccaccactaacatagttagttgtagtatccagcgtagtatcgggtgattagctcagctgggagagcacctcccttacaaggagggggtcggcggttcgatcccgtcatcacccaccaccgggtcgttagctcagttggtagagcagttgacttttaatcaattggtcgcaggttcgaatcctgcacgacccaccagttttaacatcgaagacagatgttaagcgtgtaggataacgttgcgtcagcaacggcccgtagggcgagcgaagcgagtcatcctgcacgacccaccactaatgacggtgggttcggtggaagtagtttgtagtatccagcgcagtatcgggtgattagctcagctgggagagcacctcccttacaaggagggggtcggcggttcgatcccgtcatcacccaccactcgggtcgttagctcagttggtagagcagttgacttttaatcaattggtcgcaggttcgaatcctgcacgacccaccagttttaacatcaaactcagatgttaagcgtgaaggataacgttgcgccagcaacggcccgtagggcgagcgaagcgagtcatcctgcacgacccaccaatcttaaagattggccccgagtaaaaatctttcaggtaacacccgtatgggtcgttagctcagttggtagagcagttgacttttaatcaattggtcgcaggttcgaatcctgcacgacccaccaatttaaaggtggttactggtagagaacgtgaaggataacgttgcgttagcaacggcccgaagggcgagacgaagtcgagtcatcctgcacgacccaccatcctgaatgattaaggcagcataatcccgcaaggggtcgttagctcagttggtagagcagttgacttttaatcaattggtcgcaggttcgaatcctgcacgacccaccaatgtaaaaaagcgccctaaaggcgcttttttgctatctgcgatactcaaagattcgaacctgcagcaggtttgagttgagcgcagcgaaacaacggagccgctcgcggcgacggcccgaagggcgagcgaagcgagtcatcctgcacgacccaccaatgtaaaaaagcgccctaaaggcgcttttttgctattcaggcatcctcaatttcactttgtaaacctgatgacatcgtcagagcttactgtgcaagcaactctatgtcggtggaattaggcgtaaaatgacgcatcctgcacattaggcgtaattcgagtgacttttccccaccattcgactatcttgtttagcatataaaacaaattacaccgataacagcgaatattacgctaatgtcggttttaacgttaagcctgtaaaacgagatggtaagatgagcgtaatgtttgatccagacacggcgatttatcctttccccccgaagccgacgccgttaagcattgatgaaaaagcgtattaccgcgagaagataaaacgtctgctaaaagaacgtaatgcggtgatggttgcccactactataccgatcccgaaattcaacaactggcagaagaaaccggtggctgtatttctgattctctggaaatggcgcgcttcggtgcaaagcatcccgcttctactttgttagtcgctggggtgagatttatgggagaaaccgccaaaattctcagtccggaaaaaacaattctgatgccgacacttcaggctgaatgtagtctggatctcggctgccctgttgaagaatttaacgcattttgcgatgcccatcccgatcgtactgtcgtcgtctacgccaacacttctgctgcggtaaaagcgcgcgcagattgggtggtaactagtagcattgccgtcgaacttattgatcatcttgatagtttgggtgaaaaaatcatctgggcacccgacaaacatctggggcgttacgtgcaaaaacagacgggtggagacattctatgctggcagggtgcctgtattgtgcatgatgaatttaagactcaggcgttaacccgcttgcaagaagaatacccggatgctgccatactggtgcatccagaaagtccacaagctattgtcgatatggcggatgcggtcggttccaccagtcaactgatcgctgctgcgaaaacattgccacatcagaggcttattgtggcaaccgatcggggtattttctacaaaatgcagcaggcggtgccagataaagagttactggaagcaccaaccgcaggtgagggtgcaacctgccgcagctgcgcgcattgtccgtggatggccatgaatggccttcaggccatcgcagaggcattagaacaggaaggaagcaatcacgaggttcatgttgatgaaaggctgcgagagagggcgctggtgccgctcaatcgtatgctggattttgcggctacactacgtggataacgaataataaggcgtaacgttacgctttgggggaaagatggatttttttagtgtgcagaatatcctggtacatataccaataggggcaggcggttatgatctcagttggatcgaagcggtaggcacgatcgccgggttgctgtgtattggccttgccagtctggagaagatcagcaactacttctttggcctgatcaacgtcaccttgtttggcattattttctttcagattcagctgtatgccagcctgctattacaggtgtttttctttgccgcgaatatttacggttggtatgcgtggagccgacaaaccagtcagaacgaggcggagttgaaaattcgctggttgccattgccgaaggcactcagctggttggcggtttgcgttgttagcattggtctgatgacggtatttatcaatccggtgtttgcatttttgacccgcgtggcagtcatgatcatgcaagcattaggattacaggttgtgatgcctgaactgcaaccggacgctttcccgttctgggatagttgcatgatggtgttatctatcgtggcaatgattctgatgacgcgtaagtatgtggaaaactggctgttgtgggtgattattaacgtgattagcgtcgttatttttgcacttcagggcgtttacgccatgtctctggagtacatcatcctgacctttattgcgctcaacggcagccggatgtggatcaacagcgcacgtgaaagaggcagtcgcgcgctgtcccattaatggtgatgatgactatggccagacaccccttcattcaggtggcagtctggcccatgacaaggttgatattccatctgaatggtggcgtgctcaatctgatagtgatccatcaggtagtgttggatctgatccaacaaggcatcgtgatcgtgtggcgggatcacctgcacatgcaacgtcatcaccggcttctcgcctaccatccatacatgtacatggtgcacattgcggacttccgggatttcccggcacatacgacgcttcagttcagcgatatccaggcttaccggtgcaccttcaagtaattcattcacgctatctttcaacagtcgccacgcgctacgcagaaccagaaggctcaccagtatgctgagaatggggtcagcaggtgtccagccagtccagataataatcaacgcggcaataatagccccaacgctacccagcaggtccccgagcacatgcagtgccgctgctcgtacgttgaggtttttctcttcgctgccgtgatgaagtaaccagaaagaaagtatatttgccagcaacccagccacggcaattgccatcatcatgccgccctcgaccggacgcggcgtgcggaagcgttctatcgcctcccagacaatcaaaatggtaattaccacgagggctatggcattcacaaacgccgcgagcgtggtcagtcttagccaaccgaaagtgtggcgaatggtgggaggacgacgactaaattgcacggcgagtagggcgaaaagcagggcggcagtatcggtcaacatatgacccgcatcggccagcaatgccagagaaccagaaagaaaaccaccaacgacttctaccagcataaacccggcagtcacgccgaaagcatacaacaagcgacgagcattattatcttctggcaggtgactggacgtgtgactgtgactgtgcgccatgacgagtcatcccttaattattctcacttaactttatgacatcatactgcttttagaagtgaaaaattaaaagggagagactccgctctcccattattggctattttgcagggttactgcgtggtaccgtcggttttggtatcgacatcattattgatgccatcaccggtttgtacctttttattgatatccggacagcgaccatctttgcacatggtgttcttgtgctcttcatctttggtcattccgtcattgttcatactagaaccatcgctatgcagcattgtgccgccagaaccggtatttaccccgttattgtcgacgttatttggcgcgacattttcacgggcgtcaggggctacctggcccgcatcagctgcggcgtttgcctggccgttattagtttgcgctccgctatcggcagccagtgcggcaccgctggcaaggcttagagtggcagtcagaaataatgtggccagttttgtcattttcataggatgctcctgttatggtcgttatgtcggataacctcttccaacagtgcatttgcaggtgaatataaggcattggtttaagatttcagccaggttatgaaacgcagcagagaatcttgaaataattaacaaacaaaggagttacagttagaaattgtaggagagatctcgtttttcgcgacaatctggcgtttttcttgctaattccaggattaatccgttcatagtgtaaaaccccgtttacacattctgacggaagatatagattggaagtattgcattcactaagataagtatggcaacactggaacagacatgaattatcagaacgacgatttacgcatcaaagaaatcaaagagttacttcctcctgtcgcattgctggaaaaattccccgctactgaaaatgccgcgaatacggttgcccatgcccgaaaagcgatccataagatcctgaaaggtaatgatgatcgcctgttggttgtgattggcccatgcagtattcatgatcctgtcgcggcaaaagagtatgccactcgcttgctggcgctgcgtgaagagctgaaagatgagctggaaatcgtaatgcgcgtctattttgaaaagccgcgtaccacggtgggctggaaagggctgattaacgatccgcatatggataatagcttccagatcaacgacggtctgcgtatagcccgtaaattgctgcttgatattaacgacagcggtctgccagcggcaggtgagtttctcgatatgatcaccccacaatatctcgctgacctgatgagctggggcgcaattggcgcacgtaccaccgaaagccaggtgcaccgcgaactggcaagtgggctttcttgtccggtcggcttcaaaaatggcaccgacggtacgattaaagtggctatcgatgccattaatgccgccggtgcgccgcactgcttcctgtccgtaacgaaatgggggcatagcgcgattgtgaataccagcggtaacggcgattgccatatcattctgcgcggcggtaaagagcctaactacagcgcgaagcacgttgctgaagtgaaagaagggctgaacaaagcaggcctgccagcacaggtgatgatcgatttcagccatgctaacagctccaaacaattcaaaaagcagatggatgtttgtgctgacgtttgccagcagattgccggtggcgaaaaggccattattggcgtgatggtggaaagccatctggtggaaggcaatcagagcctcgagagcggggagccgctggcctacggtaagagcatcaccgatgcctgcatcggctgggaagataccgatgctctgttacgtcaactggcgaatgcagtaaaagcgcgtcgcgggtaaggtttaattgtcggatgcgccgtcagagtggcgtatccgatgaatcaccacaggcctgataagtcgcgcagcgtcgcatcaggcaatgtgctccattgttagcaacaaaaaagccgactcacttgcagtcggctttctcattttaaacgaatgacgtttacttcgctttaccctggtttgcaaccgccgctgctttcgctgcgatctcgtcagcattacccagataatagcgtttcagcggtttgaaattctcgtcgaactcatacaccagcggcacgccagtcgggatattaagctcaagaatctcttcttcgctcatgttatcaagatatttcaccagcgcacgtaaagagttaccgtgtgcagcgatgatcacgcgctcaccgctcttcatacgcggcagaatagtttcattccagtaagggatcacgcggtcaatggtcagcgccaggctttccgtcagcggcagttctttctcgctcagtttcgcgtaacgcggatcgtgacccggataacgctcatcatctttagtcagttccggcggagtcactgcaaaaccacgacgccactgtttcacctgctcgtcgccatacttttcagcagtttccgctttgttcagaccctgcaacgcaccgtagtgacgttcgttcagtttccaggatttctcaacgggcagccatgcctgatccagttcgtccagcacattccacagggtatggatagcgcgtttcagcacagaagtgtaagcaaagtcaaagctgtaaccttcctctttcagcagcttacctgctgcttttgcttcgcttacgcctttctcagacagatccacgtcgtaccaaccggtgaaacggttttctttgttccactgactttcgccatgacgaaccagaaccagcttagttacagccatatacttactcctcaaatcatcttttaatgataataattctcattatattgccgcgacgaagcaacagcaatgcttacgcataaccatagcgaaaatagtggcgcagtgtaaggttgttgtgaatattgagttgcaaatatgtcggtgtttgctggtgatttgaacaatatgagataaagccctcatgacgagggcgtaacattactcagcaataaactgatattccgtcaggctggaatactcttcgccaggacgcaggaagcagtccggttgcggccattcagggtggttcgggctgtccggtagaaactcgctttccagagccagcccttgccagtcggcgtaaggttcggttccccggctcggtgtgccgccgaggaagttgccggagtagaattgcagagccggagcggtggtgtagaccttcagctgcaatttttcatctgcactccagacatgcgccgccactttcttgccatcgcctttggcctgtaacaagaatgcgtgatcgtaacctttcactttgcgctgatcgtcgtcggcaagaaactcactggcgatgattttggcgctgcggaaatcaaaagacgttccggcgacagatttcaggccgtcgtgcggaatgccgccttcatcaaccggcagatattcgtccgccagaatctgcaacttgtgattgcgcacgtcagactgctcgccgtcaagattgaaatagacgtgattagtcatattcaccgggcaaggtttatcaactgtggcgcgataagtaatggagatacggttatcgtcggtcagacgatattgcaccgtcgcgccgagattacccgggaagccctgatcaccatcatcactactcagggcaaacagcacctgacgatcgttctggttcacaatctgccagcgacgtttgtcgaacccttccggcccgccgtgcagctggttaacgccctgacttgggctaagcgtcacggtttcaccgtcaaaggtataacggctattggcgatacggttggcataacgaccaatagaggcccccagaaacgcggcctgatcctgatagcattccgggctggcacagccgagcagcgcctcgcggacgctgccatcggaaagcggaatacgggcggaaagtaaagtcgcaccccagtccatcagcgtgactaccatccctgcgttgttacgcaaagttaacagtcggtacggctgaccatcgggtgccagtgcgggagtttcgttcagcactgtcctgctccttgacttggtttacaaacgtaaaaagtctctttaatacctgtttttgcttcatattgttcagcgacagcttgctgtacggcaggcaccagctcttccgggatcagcgcgacgatacagccgccaaatccgccgccggtcatgcgtacgccacctttgtcgccaatcacagctttgacgatttctaccagagtgtcaatttgcggcacggtgatttcgaaatcatcgcgcatagaggcatgagactccgccatcaactcgcccatacgtttcaggtcgccttgctccagcgcgctggcagcttcaacggtgcgggcgttttcagtcagtatatgacgcacgcgttttgccacgatcgggtccagttcatgcgcaacagcgttgaactcttcaatggtgacatcacgcagggctggctgctggaagaaacgcgcaccggtttcgcactgttcacgacgggtgttgtattcgctgccaaccagggtacgtttgaagttactgttgatgatgacgacagccacacctttgggcatggaaactgctttggtccccagactgcggcaatcgatcagcaaggcatgatctttcttgccgagcgcggaaattagctgatccatgatcccgcagttacagcctacaaactggttttctgcttcctgaccgttaagcgcgatttgtgcgccgtccagcggcagatgataaagctgctgcaatacggttccgaccgcgacttccagactagcggaagaacttaacccggcaccctgcggcacattgccgctgatcaccatgtccacgccgccgaagctgttgttacgcagttgcagatgtttcaccacgccacgaacgtagttagcccattgatagttttcatgtgcgacaatgggcgcatcgagggaaaactcgtcgagctgattttcataatcggctgccatcacgcgaactttacggtcatcgcgtggtgcacaactgatcacggtttgataatcaatcgcgcagggcagaacgaaaccgtcgttgtagtcggtgtgttcaccaatcaaattcacgcggccaggcgcctgaatggtgtgagtggcagggtagccaaatgcgttggcaaacagagattgtgttttttctttcagactcatttcttacactccggattcgcgaaaatggatatcgctgactgcgcgcaaacgctctgctgcctgttctgcggtcaggtctcgctgggtctctgccagcatttcataaccaaccataaatttacgtacggtggcggagcgcagcagaggcggataaaagtgcgcgtgcagctgccagtgttgattctcttcgccattaaatggcgcgccgtgccagcccatagagtaggggaaggagcactggaagaggttgtcataacgactggtcagctttttcaacgccagcgccagatcgctgcgctgggcgtcggtcaaatcggtgatccgtaaaacgtgggctttgggcagcagtagcgtttcgaacggccaggcagcccagtaaggcacgacggctaaccagtgttcggtttcgacaacggtacggctaccgtctgccagctcgcgctgaacataatccaccagcattggacttttctgttcggcaaaatattctttttgcaggcggtcttcgcgctcagcttcgttaggcaggaagctatttgcccaaatctgaccgtgcggatgcgggttagagcagcccatcgccgcgcctttgttttcaaaaacctgcacccatgggtacgttttccccagttctgcggtttgctcctgccaggttttgacgatttccgtcaatgctgcaacgctgagctctggcagcgttttactgtgatccggactaaagcagatcacccggctggtgccgcgcgcgctctggcaacgcatcagcggatcgtgactttctggcgcatctggcgtgtcagacatcaaagccgcaaagtcattagtgaaaacgtaagtcccggtgtaatcggggtttttatcgcctgtcacccgcacattacctgcgcagaggaagcaatctggatcgtgcgcaggtaacacctgtttggctggcgtttcctgcgccccctgccaggggcgcttagcgcggtgcggactaaccagaatccattgcccggtgagcgggttgtagcggcgatgtggatgatcaacgggattaaattgcgtcatggtcgttccttaatcgggatatccctgtggatggcgactctgccagtgccaggtgtcctgcgccatttcatcgagtgtgcgcgttacgcgccagttcagttcacggtcggctttgctggcgtccgcccagtaggccggaaggtcgccctcgcgacgcggtgcaaaatgataattaaccggtttgccgcaggctttgctgaaggcattaaccacgtccagcacgctgttgcctacgccagcgccgaggttgtagatgtgtacgcctggcttgttcgccagtttttccatcgccacgacgtgaccgtccgccagatccattacgtggatgtaatcgcgtacgccagtaccatcttcggtcggataatcgttaccaaaaatcgccaggctgtcgcgacggcctacagcaacctgggcgatgtatggcatcaggttattcggaatgccttgcggatcttcgcccatatcgccgctcggatgcgcgccaaccgggttgaagtagcgcagcagggcaatgctccagtccggctgggctttttgcagatcggtgaggatctgttccaccatcagcttgcttttgccgtaagggctttgcggtgtgccggtcgggaagctttcaacgtatggaattttgggctgatcgccataaacggtggcggaggagctaaaaataaagtttttgacgttagcggcgcgcatggcgctaatcaggcgcagagtgccgttgacattgttgtcgtaatattccagcggtttttgtacgctttcgcccacggctttcagcccggcgaagtggatcacggtgtcgatagcgtgatcgtgcaggatctcggtcatcaacgcttcgttacgaatatcgccttcaacaaacgttggatgtttgccgcctaaacgctcgataacaggcagtacgatgcgcttactgttacagaggttatcaagaatgatgacatcatgaccgttttgcagtaattgcacacaggtatgacttccaatgtaaccgctaccaccggtaaccagaactctcataattcgctccattaggcttatggtatgaaataaccatagcataacaaagatgcgaaaagtgtgacatggaataaattagtggaatcgtttacacaagaatttagccgttttttatgcgcgattaagtgattataaaacagagggtttatgaatgattgcgctttttatctgaaaaaagacgcggtttcatgcctgcatgcgtcgaaccgttggccggagagggtgctaaggccgcctccggcaaggtcagcactaccgactcaatatatttttgtcagcacatagcgatagagtccaccgtccggcacgaactcaagacgatgggtaatacaggcaggcgcatcttcagcgtggtggctaacaaacaacaattgcgtttcaccttcgctaatcagcacatcaacaaaacggcggataagctggcgattcagcggatcaagcccctgtagtggttcatcgagaataagcaacgtcggatgtttcaccagtgcgcggacaatcagcgccagacgctgctgtccccaggaaagactatggaacggagcgtcagccgtgcgtttatcaatgccgagaatatccagccactgctgcaccagtttttgctggcgatcgctaacggcctgataaatgccaatgctatcaaaatagccagaaagaatcacattacgcacggtagtgctgacccggtaatccagatgcaaactactgctgacgtaaccgatatgctttttgatatcccagatggtttcgccgctgccgcgacgtcgtccgaaaagcgtcaaatcgttgctgtaaccttgcggatgatcgccagtaaccaggcttaataacgtgctttttcctgcaccatttggcccgacaatttgccagtgttcgcctggattcacctgccagctaaggttattaagaatggggcgatcgttataagaaaccacgccattgttcagcacaatgcgcggttcgttggcgggtaaggcgtgacgtgcactaggttcatccggctccggcagttgcacaccttcaagctgttcactatgcgccagttgcgcgacgagtgcttgttggagcagttcctctttagcgccagtttccgctaacgtgcaatccgccagcacgccagcaaactggacaaactccgggatctcatcgaagcgattgagcaccagtaccagagtaataccggactgatgtaagctggcgagtcgctcagccagctgctgacgactggcaacatccaggccatcgaacggctcatcaagaatcaacaagtcaggctcgctcatcagcgcctgacacagcagggtttttcgcgtctcgccagtggaaaggtatttaaagcgtcggtcgaggagggcggtaataccgaactgctgcgccagttgcatgcaacgcggtgcatcctttacttcatcctgaatgatctcagccgtagtgcgtccggtgtcatcttcgccagggccgagcatatcggtgttattccgctgccattcgtcgctgacgagtttttgcaattgctcgaaggagagacgagtgatgtgggaaaactggctttgccgttcacctttcaaaagcggaagttcccccgccagcgcgcgggccagggcgcttttcccgcttccattgctaccgacaaacgcccaactatcacccgcgtttaacgttagctgaggcaattgcagcgtttttgtgtcgctaagacgaaacgtgccttgcaaaatttgcaagctactcattttatatcccactttgtgcagcgattactgacagggatacgtgtttcataacaaattgtcaacacgcttagcacagcgtggcgataatcacgctgtcggcattaaagtaggccgtgacattctgtccttgctgaagagaagtcgcttcatttaccggcactgtggcgcacagtgtttgcccgtcgggtagcgccattaatacttcgcactgctctgcgccgcgctcaatatgactaataatacccggtaattggttgtcagcgttttgcgcgaccgcctcgtcctgagtaatacctacccacggcgcttttagcaatatcaacacttctttgccttcatccagccccagacgcgcgccgctttgtgcggtaattgcgactttcaggcgtgtttttccgtcagccagtaagacatcaacatgctgttgaacgtcatcatgatcgcgggcggtgatggtaccgaaccactggttacgggcgctggtttgcagactaaaacgactgatcgcggccagcaggctgttcagcggcagggcgtcatcgtcacttaacacatcaaaggctttttgctggatttgcgccagtaagtcatagagctgaatcagtcgctgaccatagcgggtcagtactgcgccgccgccacctttaccgcctgttgcgcgctcgaccagaatatgctcacttaactgattcatctcgttaatggcatcccaggcgcttttatagctaataccggcatctttcgctccctggctaatggaaccggaaagcgcaatgtgttttagtaggctaatgcggcgcgggtcggcgaataatttttgttggagcttaagggtgagaaggatttcggcctgcataacaatgtcctggcaaaagtcttattgtgacggaaaacgaacgccacgcaaagctgaccgcacaaaaggggagtgcttttctgtgcttagcggttagaatagtctcatgactatatctggagttgaccatgttagagttattaaaaagtctggtattcgccgtaatcatggtacctgtcgtgatggccatcatcctgggtctgatttacggtcttggtgaagtattcaacatcttttctggtgttggtaaaaaagaccagcccggacaaaatcattgattccctgaatgcccgcttagtcgggcattttctttttctcaacttcctgcttttcctgccgatattttttcttatctacctcacaaaggttagcaataactgctgggaaaattccgagttagtcgttatattgtcgcctacataacgttacattaaggggttaccaatggctcgtaaatggttgaacttgtttgccggggcggcactctctttcgctgttgctggcaatgcactggcagatgaagggaaaatcacggtgttcgccgccgcaagtctgactaacgcaatgcaggacattgctacgcagtttaaaaaagagaaaggcgtggatgtggtttcttctttcgctagcagttctactctcgcccgtcagattgaagcgggtgcgcctgcggatctgtttatttctgccgatcagaaatggatggattatgcggttgataaaaaagcgatcgatacagctacgcgtcagacactgctcggcaatagcctggtcgttgtagcaccgaaagccagcgtgcagaaagatttcaccatcgacagcaaaaccaactggactagtctgctgaatggcggtcgcctggcggttggcgatccggaacatgttcccgctggcatttatgcaaaagaagcactgcaaaaactgggcgcatgggatacgctctctccgaaactggccccagcggaagatgttcgtggggcgctggcgctggtcgaacgtaacgaagcgcctctgggcattgtctacggttctgacgcagttgccagcaaaggggtaaaagtggttgccaccttcccggaagatagtcataaaaaagtggaatatccggttgctgttgtggaagggcataacaatgcgacagtgaaagcattttatgattatctgaagggaccgcaggcagcggaaatctttaaacgttacggatttacaatcaagtaatgatactgaccgatccagaatggcaggcagttttattaagcctgaaagtttcttccctggctgtgctgtttagcctgccgtttgggatcttttttgcctggttactggtgcgttgcacgtttccgggcaaagctctgctcgacagcgtactgcatctaccgctggtgttaccgcccgtggtcgtcggttacttattattagttagcatgggacggcgcggatttatcggtgaacgtctgtatgactggtttggtattaccttcgcctttagctggcgcggcgcggttctcgctgccgccgtcatgagctttccgctgatggtgcgggcaattcgtctggcgctggaaggggttgatgtcaaactggaacaggccgcaagaacactgggggccgggcgctggcgcgttttctttactatcacgttaccgctgaccttaccgggaattattgttggtacggtactggcttttgctcgttctctcggtgagtttggtgcaaccatcacctttgtgagcaacattcctggtgaaacgcgaaccattccttctgccatgtataccctgatccagacccccggcggggaaagtggagcggcgagactgtgcattatttctattgcgctggcgatgatctccctgttgattagtgaatggctggccagaatcagccgtgaacgggcggggcgctaatcatgctggaactgaatttttcccagacgttgggcaaccattgcctgactattaatgaaacgctgcccgccaatggcatcactgctatctttggcgtctccggtgccggaaaaactagcctgattaacgccatcagtggactgacgcgcccgcaaaaagggcggattgtcctcaatgggcgggtactaaatgatgccgaaaaaggtatctgcctgacgccggaaaagcgtcgcgttggctatgtttttcaggatgcgcggctgttcccgcattacaaagtgcgtggcaatctgcgctacggcatgagcaaaagtatggtcgatcagttcgataagctggtggcgcttttaggcattgaaccgttgcttgaccgtttaccaggcagcctgtccggaggcgaaaaacagcgcgtggcgattggtcgggctttgctgacagcaccggaattgctgttgctggatgaaccgctggcgagtctggatattccgcgtaaacgcgaactgttgccttatctgcaacggctgacacgggaaatcaacattccgatgttgtatgtcagccatagcctggatgagatcctccatctggcagacagagtgatggtactggaaaacggtcaggtgaaagcctttggcgcgctggaggaagtgtggggcagtagcgtgatgaatccgtggctgccgaaagagcaacaaagtagcattctgaaagtgacggtgcttgagcatcatccgcattacgcgatgaccgcgctggcgctgggcgatcagcatttgtgggtcaataagctggacgaaccgctgcaagctgcgctacgtatccgcattcaggcttccgatgtttctctggttttacaaccgccgcagcaaaccagcattcgtaacgtattgcgggcaaaagttgttaatagttatgacgacaacggccaggtggaagtggaactggaagtcggcggtaaaacgctgtgggcgcgtatcagcccgtgggccagggatgaactggcgatcaaacctggcctgtggctgtacgcgcaaattaaaagtgtgagcataaccgcctgattaaatcaggtggctataaatgaactgggcaatgctgtcggtggtgttatcaccaatcacaatgttggcgcgcgcttttaccgcgtcatcggcgttgcccatcgccacgcctgtaccagcggcttccagcatactgatatcattaaagttatcgccgaatgccacgacgttttccatgctccaaccttgcgcctcaacccatttcgtcaaacgtttacctttgctgttgccgccgcgtgcaatatcaacctgatcgtgccaggaccattcacactccagtcccagttcatgttcgacatgcttaccaaaatgctgcaattgcggcaggtcatcgtgcgtcagggcgaacttccatacggcgttaacttgttgcgccgtttcagccagagaagcgacttgtgtgaaagtcggacgctgttccggcggcagggtttgcgcccagttagatgtgcgaatgacatgcccggtcgggtgctcatagaccattgcatcatcgacatacatcagaccgtgaatgtggtgttcattcagcatctcaatgagttgcagggctttaataacgggcattgggtccgcttccagcacggtttttgcatgataatcatacaaataggtgccattacagcaaatagcaggtgtatccagcgccagcgcctgataaaaaggatgaatagcgacgtgatggcgacctgtgacgatgattaattgatagcctgcttcgcgagcgcgggccagggcttctatgctactaggaagcagggtctttttcggggtcaataaggtgccgtctaagtcgagagcaatcacgcgtgtggtcatggcgtattccagattaaggttaagaattttcgtctgcgcgaatggtacaccgataccactatcggacaaaattctgcgttttaattcagcattcaccgccaaaagcgactaattttagctgttacagtcagttgctaaatgcaaaggagcattcatgaagcaaacagtttatatcgccagccctgagagccagcaaattcacgtctggaatctgaatcatgaaggcgcactgacgctgacacaggttgtcgatgtgccggggcaggtgcagccgatggtggtcagcccggacaaacgttatctctatgttggtgttcgccctgagtttcgcgtcctggcgtatcgtatcgccccggacgatggcgcactgacctttgccgcagagtctgcgctgccgggtagtccgacgcatatttccaccgatcaccaggggcagtttgtctttgtaggttcttacaatgcgggtaacgtgagcgtaacgcgtctggaagatggcctgccagtgggcgtcgtcgatgtggtcgaggggctggacggttgccattccgccaatatcagtccggacaaccgtacgctgtgggttccggcattaaagcaggatcgcatttgcctgtttacggtcagcgatgatggtcatctcgtggcgcaggaccctgcggaagtgaccaccgttgaaggggccggcccgcgtcatatggtattccatccaaacgaacaatatgcgtattgcgtcaatgagttaaacagcagtgtggatgtctgggaactgaaagatccgcacggtaatatcgaatgtgtccagacgctggatatgatgccggaaaacttctccgacacccgttgggcggctgatattcatatcaccccggatggtcgccatttatacgcctgcgaccgtaccgccagcctgattaccgttttcagcgttagcgaagatggcagcgtgttgagtaaagaaggcttccagccaacggaaacccagccgcgcggcttcaatgttgatcacagcggcaagtatctgattgccgccgggcaaaaatctcaccacatcagcgtatacgaaattgttggcgagcaggggctactgcatgaaaaaggccgctatgcggtcgggcagggaccaatgtgggtggtggttaacgcacactaaccgctgatttacccggcgcagtctctcctgcgccggtgtattaacctatctcctgtaacgcgtgtctctggcgttcgacgatattggtccacaaattgtctttatcgtcagtccataaattaatcagcaaggcaaaaaagcgttctgctgctggagaaagtacggcatctttacggcgaattattcccaatgttcgacgtataacgggttccaccaatgggataccaataatgctagaatagggcgcatgaggcattgccaggccaggaagcgcgctaatccccagtcccgcctccaccagtcctaaactcgtgctaagatgacgcacttcgtaaaaccagtccagcttccagggcttgtcggccagctgttgttctatcaacagtcggttgccgctggaggagcgtacgccaatcattttgtaacccactaactcctgccattctacaagctgctttttggccaatggatggtcacgccgacaggccagcacgaacggctcgttgaccagtggggtaaaatcaatggaactatttgtgacgttgttcatgtttatgccaaagtcactttcgttacacagcacgctttccatgcaattattcgtgccttgttccagaatccgcactttaatattgggatacagctcattaaatttaccgattgccagcggtaaaaaataaaatactgcggtcggaatacacgctaacgtcaccataccacgatgataagcattcatatcacgaatattaaaaagcgtttcatcgaatttctttattaattcccgcgcctccgggagcaacctttttcctgcttttgttaacgtaaccttgcgagttgtacgctcaaatagttgaacatgtaaatcttcctccatcttttttattcttcgcgttaatgcaggttgcgtaatattgagtaatttagcggcattgttaaagctactggactctgccagtatgacaaatgccttcatactacttaattcatgcttcattattactccggaaaatggaaggctgctttttgggtggctggccgttaaaaattttaactgcatttagccaacttaaattaatgaaaaaatgttattaatcgttgagctaaagtcattagagatgctttgcccttaatgtaaccatatcgcaataagttatgtttttaaattgagggcattattatgaaaaaaataccctgcgtgatgatgcgaggtggaaccagcaggggcgcgttcctgttagcggaacatttacccgaagatcaaacgcagcgcgataaaatattgatggcaattatgggttccggtaacgatctggaaattgacggtattggcggcggtaatccactgaccagtaaagtcgccattattagccgttccagcgatccgcgtgctgatgtcgattatctgtttgcgcaggtaatcgttcatgagcaacgtgtcgataccacgcctaactgcggcaatatgctgtctggtgttggggcattcgccattgaaaatggtttgattgcagcgactagcccagttactcgcgtacgtatccgcaacgtcaatacgggtacgttcatcgaagctgatgtgcaaacgccaaatggtgttgtcgagtacgagggtagcgccagaattgacggcgtaccgggtactgccgcaccggttgcgctcactttcctgaatgccgctggaaccaaaaccggaaaagttttcccgactgataatcagattgattattttgacgatgtcccggtgacctgtatcgatatggcgatgccagtcgtcattattccggctgaatatctgggaaaaacaggttatgaattaccggcggaactggatgccgacaaagcattattagcccgcattgaatctatccgtctacaagcgggtaaagcaatgggcttaggtgatgtcagtaatatggttatccctaaacctgtgcttatttctccagcgcagaaaggcggggcaattaatgtgcgttattttatgccgcattcttgccatcgcgcgctggcgataaccggtgctattgctatttccagtagttgtgcattggaaggcaccgtcacccgacaaatcgtcccttctgtaggatacggcaatatcaatattgaacaccccagtggtgcgctcgacgttcatttaagtaatgaaggtcaggatgccacgacgttacgcgcatctgttattcggacgaccagaaaaatattttccggtgaagtttatcttccctgaaaaaattcgttgtcaggataaggacaatcaataaaggacttctgtatgagtcatacagaaagaacaggattttaaatgaataagaaaagcttatggaagctaattctgatattagcgatcccatgtattattggttttatgccagctccggcaggattaagcgaactggcgtgggtgctttttggtatttacctggcggccattgtggggctggttatcaagcctttcccggaacctgtcgtactgttaattgccgttgctgccagtatggtggtggtcggtaacttatccgacggtgcgtttaaaaccaccgccgtattaagcggttactctagtggtaccacctggctggtgttcagcgcgtttaccttaagcgccgcatttgtgaccaccggtttaggtaaacgtattgcctatctgctgattggtaaaatcggtaacaccacgctgggtctgggttacgttacggtattcctcgatctggtactggctccggcaacaccgtctaacaccgcgcgtgcgggcggcattgtgttaccgatcatcaacagcgtggcggtggctttggggtccgaaccggaaaaaagtccgcgtcgtgtcggacattacctgatgatgtccatttacatggtcaccaaaaccaccagctatatgttctttaccgcaatggcggggaacattctggcgctgaaaatgatcaacgacattctgcacctgcaaattagctggggtggatgggcgctggcagccggattgccgggcatcattatgctgctggtcaccccgctggtgatttacaccatgtatccaccagaaattaagaaggtggataacaaaaccatcgctaaagcgggccttgccgaactaggaccgatgaaaatccgcgaaaaaatgctgctcggtgtctttgtgctggcgctgctgggctggattttcagtaagtctctgggggttgatgaatccaccgtggcaatcgttgttatggcaaccatgctgctgctgggtatcgttacctgggaagacgtggttaaaaataaaggcggctggaataccttaatctggtacggcggtattatcggcttaagctccttattaagcaaagttaaattcttcgaatggttagctgaagtctttaaaaataacctggcatttgatggtcacggtaacgttgctttcttcgttattattttcctcagcattatcgtgcgttatttcttcgcttccggtagtgcctatatcgttgctatgttaccggtatttgccatgctggcgaacgtctccggcgcaccgttaatgttaaccgcgctggcactgttgttctccaactcctatggcggcatggttactcactatggcggcgcggcaggtccggtcatctttggcgtgggttataacgatattaaatcctggtggttggtcggtgcggtactgacgatattaaccttcctggtgcatatcaccctcggcgtgtggtggtggaatatgctgatcggctggaacatgctgtaaatattctcgtcatacttcaagttgcatgtgctgcgtctgcgttcgctcaccccagtcacttacttatgtaagctcctggggattcactcgcttgtcgccttcctgcaactcgaattatttagagtatatccatttattatctttctgcgcacttcacggtgcgcagatatctggagcatttgatgatcaagttatctgaaaaaggcgtgtttctcgccagtaataacgaaataattgccgaagaacatttcaccggcgaaattaaaaaagaagaagccaaaaaaggcactattgcctggtctattctctctagccataatacgtccggaaatatggataaacttaaaattaagtttgatagtttagcctctcacgatattacctttgttggtattgtacagaccgctaaagcgtccggtatggaacgtttcccgctgccgtatgtgctgaccaactgccataacagtctctgcgccgtcggcggcactattaacggtgatgaccatgtttttggtttaagcgcggcccagcgttatggcggtatttttgtgcctccgcatattgcggtcatccatcaatatatgcgtgagatgatggcaggcggcggcaaaatgatcctcgggagtgacagccacacccgttacggtgcattagggacaatggcagtcggtgagggcggcggtgagttggtaaaacagctgcttaatgacacctgggatatcgactatccgggcgtggttgcggtgcatctgaccggaaaacctgcgccgtatgtggggccacaggatgtggcgctggctatcattggcgcggtgttcaaaaacggttacgtcaaaaacaaagtcatggagttcgttggaccgggcgttagcgcgctctctaccgatttccgtaacagcgttgacgtgatgaccactgaaacgacctgtttaagttctgtctggcaaaccgatgaagaagtccataactggctggcgctgcacggtcgcggccaggattactgccagcttaaccctcaaccgatggcgtactacgatggctgcatcagcgttgatttaagcgccatcaaaccaatgattgcgctgccgttccacccgagcaacgtgtatgaaatcgacacactgaaccagaacctgaccgacattctgcgtgagattgaaattgagtccgaacgcgtggcgcacggtaaagccaaactcagcctgctggataaagtggaaaatggtcgcctgaaagtgcagcaggggattatcgcgggctgttctggcggtaactacgaaaacgtcatcgcggcggcgaatgcactgcgcggtcaatcctgtggcaatgacaccttcagcctggcagtttacccgagtagtcagccggtgtttatggatctcgccaaaaaaggtgtggtagcagatttgattggcgcaggcgcaatcatcagaaccgcgttctgcggcccatgctttggcgcgggcgatacgccaatcaacaacggtttgagtattcgccacaccacgcgtaacttcccgaaccgcgaaggctctaagccagctaatgggcagatgagtgcggtggcgttgatggacgctcgttctatcgctgcgactgcggcaaacggtggctatttaacctctgccagcgaacttgattgctgggacaacgtgccggagtacgccttcgatgtaacgccgtataaaaaccgtgtttatcagggctttgtgaaaggggcaactcagcaaccgctgatttacgggccgaacattaaagactggccggaattgggtgcgctgactgacaatatcgtcctgaaagtgtgcagcaagatcctcgacgaagtgaccaccaccgacgaactgattccttccggtgaaacctcttcttatcgtagtaatccgattggtctggcggagtttaccctgtctcgccgcgatcccggttatgttagcagaagtaaagcgactgctgagctggaaaatcagcgtctggcggggaatgtcagcgagctgacagaggtgtttgcgcgcattaagcagattgctggtcaggagcatattgatccgctgcaaactgaaattggcagcatggtctatgcggtgaaaccaggcgatggttctgcgcgtgaacaggcggcgagctgccagcgtgtgattggcggtctggcgaatattgccgaggagtacgcgactaaacgctatcgttctaacgtcatcaactgggggatgttaccgctgcaaatggcggaagtaccaacctttgaagtgggggattacatttacatccctggcattaaagcggcgctggataatccgggtacgacgtttaaaggttatgtgatccatgaagatgcgccggtaacggaaattacgctctatatggaaagtctgactgctgaagagcgcgagattatcaaggcgggtagtttgattaacttcaataaaaaccgtcagatgtaaaaagcgccatgtgaatgtaggtcgcattcggcacttattgtcggatgcgatgcttgcgcatcttatccgacctacgaatcgcatcgaatctgtaggccagataaggcattttcgcagcatccggcacttattgtcggatgcgatgcttgcgcatcttatccgacctacaaatcgcatcgaaccgtaggccggataaggcgtttacgccgcatccggcaaatagttaattgcccttacttcttcgcctctgcaaccactttactacccacgccgcggttattgtattcccacatgcggttgtagttagtgtcattcagattgcgctgtatttcgtcgttatcatctacgctgccggtattacccgcaaacggacgattagagatcaccgcatcggcccacggtttagccgtgttaaaaccttcgttgatggcgctatcacggatcaccacctgaccgttggtattggcatcaacatccaggctgcggcccagttgcgccacaccatcaccgaaagcattgaaacggctgtttacggcgaggaaaccgtagtaaatgttggacagcgtagccggtgcaaacacatacgcttcttgctgagtacgactgttcaccacgcggaattcggtgttatcgaacaccactgcgccgcgaccagaaacgatatccacatccccttcaatgtagctgttggtcaccagcgtacgcggctgacgattcgtttccagacggttctgcacaccgctgttggtgacaaagaaggtgttctgacgaccgagaatgttaacgttgttaatctgtacctggtcaccatcagtacgcagtgccaccgccggatggttacctgcatctacgctatcgcccagcgtgttttcgatggtcagattttgcagttgcaggccattgttttgactccagaagaccgcagagcagagaacaccgatactgtcgctgcgtttgctctggcagctatcgtacatataccacgctggtttacctggcatatatttgccgcgcgggttgacgtcgtgacgccagtcggcagggctcatgccaccatcaagggaaagcccaatcttcacatcaatcggtttttcacctgtaccgtacagagtaattccacccggagcggcagggacatataccgttccctgatactcaccaggcatcacggcaatatactggcgcttgttggtacgcttgataattgccgcatctaccgccgcctgaatcgtggtatgcgttacaccttgagtgcccgccgggccgacaacaaagtcaggttgcgcaggcagggtaatcggggaaggattccacgctgcagcacctggtgtcagggatgcaaaatagtgttgagcatcgaaattctgcgcttcttttgcgctcagaatcgggcgagaagaggtaccaggcgcggtttgatcagaaggacgttgatcgggcggggtactgctacaggcggtcagcgtcacgccaaaagccaatgccagcgccagacgggaaacactaaatgtgttcacaggttgctccgggctatgaaatagaaaaatgaatccgttgaagcctgcttttttatactaacttgagcgaaacgggaaggtaaaaagacaaaaagttgtttttaatacctttaagtgataccagatggcattgcgccatctggcagagtgattaactaaacatcgcagtaatgctggcgcttgccagagagtggaaatgaacgttaaacccgaccatcgcgccgctggcaccttcatcgacatcaatacgttctatatccagcgcgtgaacggtaaaaatgtagcgatgagtttcgcctttcggcggtgctgcgccatcgtacccggttttaccaaagtcggtacgcgtctgcaaaacgccgtctggcattgctaccagaccagagccaaacccttgcggtaatacgcgggtatcagcgggtaagttaacaactacccagtgccaccagccggagccggttggcgcatccgggtcgtagcaggtgacaacaaaacttttcgttcccgcaggaacatcatcccacgccagatgcggactaatattatcgccatcgtaacccatgccgttaaagacatgacgatgcggcaatttatcgccatcgcgcagatcgttactgatgagtttcatgaaccctcctttcttgtttgcagaaagtgtagccagaaaccctcacgcggacttctcgttattggcaaaaaaatgtttcatcctgtaccgcgcggttaaccgctgcggtcagacgctgcaactgttgcgggagaataatatagggcggcatcaggtaaatcagtttgccaaaaggccggatccagacaccctgttcgacaaagaatttttgcagcgccgccatattcaccggatgagtggtttcgaccacgccaatggcccccagtacgcgcacatcggcaaccatttcggcatcacgggcgggggcaagttgctcgcgcagctgtacttcaatatccgccacctgttgctgccagtcgccagattcgagaatcgccaggctggcgtttgctgccgcgcaggccagcggattgcccataaaagttggcccatgcataaagcaaccggcttcaccgttactgatggtttctgcaacctcgcgcgtggtgagtgtggcggaaagggtcattgtgccgccggttaaggctttaccgaggcacaaaatgtccggcgcgatttctgcatgttcacaggcaaacagtttcccggtacgaccaaatccagtggcgatctcgtcggcaatcagcaagataccttcgcgatcgcatattttgcggattcgttttaaccattccggatggtacatgcgcatcccgcctgcgccctggacaatcggctcaatgatcaccgccgcgatttcatgacgatgcgccgccatcaggcgggcaaagcccaccatatcgcgctcatcccattcgccatccatgcggctttgcggggcgggagcaaacaggttttctggcaggtagcctttccacagactgtgcatactgttatccggatcgcacacgctcatcgcgccaaaggtatcgccatgataaccattgcggaaggtcagaaaacgctggcgcgcttcgcctttggcttgccagtactgcaacgccattttcatcgccacttccaccgctacggaaccggagtccgcgagaaaaacgcactccagcggttgcggcgtcatcgccaccagtttgcggcacagctcaatggctggcgcatgggtgataccgccaaacatcacatggctcatggcatcaatttggctcttcatcgccgcattaagctgcgggtgattgtagccgtggatcgccgcccaccaggagctcataccgtcaaccaggcgtctgccgtcagacaaaatcagctcgcaaccttcggcgctcaccaccggataaaccggcagaggggaggtcatggatgtgtatgggtgccagatatggcgttggtcaaaggcaagatcgtccgttgtcataatcgacttgtaaaccaaattgaaaagatttaggtttacaagtctacaccgaattaacaacaaaaaacacgttttggagaagccccatggctcaccgcccacgctggacattgagccaagtcacagaattatttgaaaaaccgttgctggatctgctgtttgaagcgcagcaggtgcatcgccagcatttcgatcctcgtcaggtgcaggtcagcacgttgctgagcattaagaccggagcttgtccggaagattgcaaatactgcccgcaaagcagccgctacaaaaccgggctggaagccgagcggttgatggaagttgaacaggtgctggagagcgcgcgcaaagcgaaagcggcaggaagcacgcgcttctgtatgggcgcggcgtggaagaatccccacgaacgcgatatgccgtacctggaacaaatggtgcagggggtaaaagcgatggggctggaggcgtgtatgacgctgggcacgttgagtgaatctcaggcgcagcgcctcgcgaacgccgggctggattactacaaccacaacctggacaccagcccggagttttacggcaatatcatcaccacacgcacttatcaggaacgcctcgatacgctggaaaaagtgcgcgatgccgggatcaaagtctgttctggcggcattgtgggcttaggcgaaacggtaaaagatcgcgccggattattgctgcaactggcaaacctgccgacgccgccggaaagcgtgccaatcaacatgctggtgaaggtgaaaggcacgccgcttgccgataacgatgatgtcgatgcctttgattttattcgcaccattgcggtcgcgcggatcatgatgccaacctcttacgtgcgcctttctgccggacgcgagcagatgaacgaacagactcaggcgatgtgctttatggcaggcgcaaacagcattttctacggttgcaaactgctgaccacgccgaatccggaagaagataaagacctgcaactgttccgcaaactggggctaaatccgcagcaaactgccgtgctggcaggggataacgaacaacagcaacgtcttgaacaggcgctgatgaccccggacaccgacgaatattacaacgcggcagcattatgagctggcaggagaaaatcaacgcggcgctcgatgcgcggcgtgctgccgatgccctgcgtcgccgttatccggtggcgcaaggagccggacgctggctggtggcggatgatcgccagtatctgaacttttccagtaacgattatttaggtttaagccatcatccgcaaattatccgtgcctggcagcagggggcggagcaatttggcatcggtagcggcggctccggtcacgtcagcggttatagcgtggtgcatcaggcactggaagaagagctggccgagtggcttggctatagccgggcactgctgtttatctctggtttcgccgctaatcaggcagttattgccgcgatgatggcgaaagaggaccgtattgctgccgaccggcttagccatgccagtttgctggaagctgccagtttaagcccgagccagcttcgccgttttgctcataacgatgtcactcatttggcgcgattgcttgcttccccctgtccggggcagcaaatggtggtgacagaaggcgtgttcagcatggacggcgatagtgcgccactggcggaaatccagcaggtaacgcaacagcacaatggctggttgatggtcgatgatgcccacggcacgggcgttatcggggagcaggggcgcggcagctgctggctgcaaaaggtaaaaccagaattgctggtagtgacttttggcaaaggatttggcgtcagcggggcagcggtgctttgctccagtacggtggcggattatctgctgcaattcgcccgccaccttatctacagcaccagtatgccgcccgctcaggcgcaggcattacgtgcgagcctggcggtcattcgcagtgatgagggtgatgcacggcgcgaaaaactggcggcactcattacgcgttttcgtgccggagtacaggatttgccgtttacgcttgctgatagttgcagcgccatccagccattgattgtcggtgataacagccgtgcgttacaactggcagaaaaactgcgtcagcaaggctgctgggtcacggcgattcgcccgccaaccgtacccgctggtactgcgcgactgcgcttaacgctaaccgctgcgcatgaaatgcaggatatcgaccgtctgctggaggtgctgcatggcaacggttaataaacaagccattgcagcggcatttggtcgggcagccgcacactatgagcaacatgcagatctacagcgccagagtgctgacgccttactggcaatgcttccacagcgtaaatacacccacgtactggacgcgggttgtggacctggctggatgagccgccactggcgggaacgtcacgcgcaggtgacggccttagatctcagcccgccaatgcttgttcaggcacgccagaaggatgccgcagaccattatctggcgggagatatcgaatccctgccgttagcgactgcgacgttcgatcttgcatggagcaatctcgcagtgcagtggtgcggtaatttatccacggcactccgcgagctgtatcgggtggtgcgccccaaaggcgtggtcgcgtttaccacgctggtgcagggaagcttacccgaactgcatcaggcgtggcaggcggtggacgagcgtccgcatgctaatcgctttttaccgccagatgaaatcgaacagagcctgaacggcgtgcattatcaacatcatattcagcccatcacgctgtggtttgatgatgcgctcagtgccatgcgtagcctgaaaggcatcggtgccacgcatcttcatgaagggcgcgacccgcgaatattaacgcgtagccagttgcagcgattgcaactggcctggccgcaacagcaggggcgatatcctctgacgtatcatctttttttgggagtgattgctcgtgagtaaacgttattttgtcaccggaacggataccgaagtggggaaaactgtcgccagttgtgcacttttacaagccgcaaaggcagcaggctaccggacggcaggttataaaccggtcgcctctggcagcgaaaagaccccggaaggtttacgcaatagcgacgcgctggcgttacagcgcaacagcagcctgcagctggattacgcaacagtaaatccttacaccttcgcagaacccactagcccgcacatcatcagcgcgcaagagggcagaccgatagaaagtttggtaatgagcgccggattacgcgcgcttgaacaacaggctgactgggtgttagtggaaggtgctggcggctggtttacgccgctttctgacactttcacttttgcagattgggtaacacaggaacaactgccggtgatactggtagttggtgtgaaactcggctgtattaatcacgcgatgttgactgcacaggtaatacaacacgccggactgactctggcgggttgggtggcgaacgatgttacgcctccgggaaaacgtcacgctgaatatatgaccacgctcacccgcatgattcccgcgccgctgctgggagagatcccctggcttgcagaaaatccagaaaatgcggcaaccggaaagtacataaaccttgccttgttgtaaccattctgtatttggttaaattgcgagcgagatcgcgtcttcgattgactgcaatttaaccaattaaattctaaaataatcacgaaaaaaattttacttccgcctcatgcggcgaatgtgggaattgcccaggcggcgggggataggggctggagacagttatccactattcctgtggataaccatgtgtattagagttagaaaacacgaggcaagcgagagaatacgcggcttgcacgcgaattggcgttaaagacggctcaaagaaatatcttttattttttaactggttagataaatgcaatggcagtcactgaacaggcatctcttgccataaaactgtcatcactcatcttgacaaatgttaaaaaagccgttgctttggggataacccggtaaggccggagttttatctcgccacagagtaaattttgctcatgattgacagcggagtttacgctgtatcagaaatattatggtgatgaactgtttttttatccagtataatttgttggcataattaagtacgacgagtaaaattacatacctgcccgcccaactccttcaggtagcgactcatgagtaaaccgttcaaactgaattccgcttttaaaccttctggcgatcagccagaggcgattcgacgtctcgaagaggggctggaagatggcctggcgcaccagacgttacttggcgtgactggcagtgggaaaaccttcaccattgccaatgtcattgctgaccttcagcgcccaaccatggtacttgcgcccaacaaaacgctggcggcccagctgtatggcgaaatgaaagagttcttcccggaaaacgcggtggaatatttcgtttcctactacgactactatcagccggaagcctatgtaccgagttccgacactttcattgagaaagatgccagcgttaacgaacatattgagcagatgcgtttgtccgccaccaaagcgatgctggagcggcgtgatgtggttgtggtggcgtctgtttccgcgatttatggtctgggcgatcctgatttatatctcaagatgatgctccatctcacggtcggtatgattatcgatcagcgcgcgattctgcgccgactggcggagctgcaatacgctcgtaatgatcaagcattccagcgtggtactttccgcgttcgtggcgaggtgatagatatcttcccggcagaaagcgatgacattgcacttcgcgtggaactgtttgacgaggaagtggaacgattgagcttatttgacccgctgaccgggcagattgtttccactattccacgttttaccatctacccgaaaacgcactacgtcacaccgcgcgagcgcatcgtacaggcgatggaggagatcaaagaagagctggccgccagacgcaaagtgctgttggaaaacaacaaactgctggaagagcagcggctgacccagcgtacccagtttgatctggagatgatgaacgagctgggctactgtagcgggattgaaaactacagccgcttcctctccggtcgtggaccgggtgagccaccgccgacgctgtttgattacctgcctgccgatgggctgctggtcgtcgatgaatctcacgtcaccattccacaaattggcggcatgtatcgcggtgaccgggcgcgtaaagagacactggtggagtacggcttccgcctgccaagtgcgctggataaccgtccgcttaagtttgaagagttcgaagcattagcgccgcaaaccatctatgttagcgcgacgccgggtaattacgagctggaaaaatccggcggcgatgtggtggatcaggtggtgcgtccaaccggattgcttgacccgattatcgaagtgcggccggtggcgacacaggttgatgatcttcttagcgagattcgtcagcgagcggcaattaacgaacgcgtactggtcaccacactgaccaagcggatggcggaagatcttaccgaatatctcgaagaacatggcgagcgcgtgcgttatcttcacagtgatatcgacaccgtcgaacgtatggagattatccgcgacttgcgtctgggtgagttcgacgtgctggtagggatcaacttactgcgcgaaggtctggatatgccggaagtgagcctggtggcgatcctcgacgctgacaaagaaggcttcctgcgttccgaacgtagcttgatccagaccattggtcgtgcggcacgtaacgttaacggtaaagcgattctctacggcgataagatcaccccaagtatggcgaaagcgattggcgaaaccgaacgtcgccgtgagaaacagcagaagtacaacgaggaacacggaattacgccgcaaggcttgaacaagaaagtggtcgatatcctggcgctggggcagaacattgccaaaaccaaagcgaagggcagaggaaaaagccgcccgattgttgagccggataatgtgccgatggatatgagccctaaagcgttgcagcagaaaatccatgagctggaagggttgatgatgcaacacgcgcagaatctggagttcgaagaagcggcgcaaattcgtgaccagttgcatcagctgcgtgagctgtttatcgcggcaagctaacaggatagcgaagaagactgatgacaaacggaaaacagcctgatgcgctacgcttatcaggcctacattttctccgcaatatattgaatttgcgcggtttgtaggccggataaggcgttcacgccgcatccggcataaacaacgcgcactttgtcttcaataggaagccggaattttccttcggatttccgttaacctaaagcctgtaacgccttttccagcgcgttatgtaacaactggcggtcatgacgatacggaatatcgctggcctccagtacctcctggatcacaatccgctctttcaccgcgctgacatccacttttggcccgacgatgaccgcatcaatgacctttttaccaacatactgctccataattgccagcttgctttccagcttcaaattagccgcaggtaaactcaactcacgccccagattgccgatataaaccatcggcgctggcgtgcggcgtaatgcctgggcgatttccttcagcagcagaattggcatcaggctggtataaaaactgccaggcccaataatgatgagatccgcttcattgatagcgtgaaccgcctcacgcgttgcgggtacattaggcgttaacaataactcttgaatcggcgtagttaactggtcgatattgacctcgccgtaaacttcatgcccctgatcgtcaatcgccatcagatcaacaggatgctcactcattggaatcaaatgcgtatccactttcagcagattacgaattaaattgatggcttccagaggccgcacgctaaggtgatccagcgcctttaacatcaagtttccgagattatgaccggaaagttcgccattgccaccaaaacggtattcaaacatcgcggaggcgacgctcggttccgttatcagctggttgaggcagttgcgcatatcgccccaggcaatgccgccttcactacggcgaatacgccccgtgctgccaccattatcggtggtggtgacgatacccgttaaacgagaacccaaagagctaagactactgagaacgcgtcccagtccatgccctccgccgagagcaacgacacgatcaagatcagccagcgtacgattgcgcatatagtttcctggagtcagattatccgcgctacagtagcgcaaattgcggggaaacagcaattaacctgccaatattgaggatacaaactattttcttctacctctaaaggacgatgcacgctatgcctccctgatgatgtatatcaaagtaaaaccgccattttcccttattctgtagcgaaatagcacgatcatgacgctatatacatgattacatagcgaaagtgtggatggtaaaaatctcatttacacgctagtatcggcataaccactaaacactctagcctctgcacctgggtcaactgatacggtgctttggccgtgacaatgctcgtaaagattgccaccagggcgaaggaagaaatgacttcgcctcccgtatctggaaaggtgtacatggctagtcaactgactgatgcatttgcgcgtaagttttactacttgcgcctgagcattaccgatgtgtgtaactttcgttgcacctactgcctgccggatggctacaaaccgagcggcgtcaccaataaaggctttcttaccgtcgatgaaattcgccgggttacgcgcgccttcgccagactgggcaccgaaaaagtgcgcctgacaggaggagagccgtctttacgccgcgactttaccgatatcatcgccgctgtgcgggaaaacgacgctatccgccagattgcggtcacaaccaatggttaccgtctggaacgcgatgtggcgagctggcgcgatgcgggacttactggcattaacgtcagtgtcgacagtctggacgcccgccagtttcacgctattaccgggcaggataaattcaaccaggtcatggcagggattgatgctgcatttgaggccggttttgagaaggtcaaagtcaataccgtgctgatgcgtgatgttaatcatcaccagctcgacacctttctgaactggatccagcatcgccctatccagctgcgtttcatcgaactgatggaaacgggcgagggcagcgagctcttccgtaagcatcacatctctggtcaggttctgcgtgacgagctactgcgtcgcggctggatccaccaattacgtcaacgcagcgacggtcccgcgcaagtcttttgccatccagattacgccggagagattggccttatcatgccgtatgaaaaagacttctgcgccacttgcaaccgcctgcgcgtttcctccattggtaaactccatctctgcctgtttggtgaaggcggcgttaacctgcgcgatctgctggaagacgatacccagcaacaggcgctggaagcgcgtattagtgcggcgctgcgggagaagaaacagacccatttcctgcatcaaaacaacaccggtattacgcaaaacttaagctacattggcggctaaaacgtcaaaaggagagatcagatgagtcaggtaagcactgaatttatcccgacccgtattgctattcttacggtttctaatcgtcgcggtgaagaagacgatacctccggtcactatctgcgcgatagcgcgcaagaagcgggccatcacgttgtcgataaagccattgtgaaagaaaaccgctacgctattcgcgctcaggtatctgcgtggatcgccagcgacgatgtacaagtggtattgattacgggtggtactggcctgacggaaggtgatcaggctcccgaagcattgctgccgttgttcgaccgtgaagttgaaggttttggtgaagtgttccggatgttgagctttgaagagattggcacttccacgttgcaatctcgtgcggtagcgggcgtcgccaacaaaacgctgattttcgccatgccgggtagcaccaaagcgtgccgtaccgcatgggaaaatatcatcgcgccgcagctggatgcccgtacgcgtccgtgtaatttccatccacatttgaagaaataagtatgagccaactgacccatatcaacgccgctggcgaagcgcacatggtggatgtctccgccaaagcggaaaccgtgcgtgaagcgcgggcggaagcctttgtcaccatgcgcagcgagacgctggcgatgattattgatggtcgccaccacaaaggcgacgtatttgccactgcgcgtattgccggtattcaggcggcaaaacgcacctgggatctgatcccgctctgtcatccgctgatgctcagcaaagttgaagtcaatttacaggccgagccggagcacaatcgggtgcgtatagaaaccttatgccgcctgaccgggaaaaccggtgtcgaaatggaagcattaaccgcggcctccgtggcggcgctgaccatttatgacatgtgcaaagcggtgcaaaaagatatggtgattggtccggtacgtttgctggcgaagagcggcggcaagagcggtgactttaaggtggaagcggatgattaaagttctttttttcgcccaggtgcgcgagttggtgggaacagatgcaaccgaagtggctgcggatttcccaactgttgaagcgttacgccagcacatggctgcgcagagcgatcgctgggcgctggcgctggaagatggcaaattactggctgccgtcaaccagacgctggtgagttttgaccatccgctgactgacggcgacgaagtagctttcttcccgccggtaaccggaggttaagatggcagaaaccaaaattgttgttggtccgcagccgttcagcgtaggagaagagtacccgtggctggcggagcgtgacgaagacggtgcggtagtcacctttactggtaaggtgcgcaaccataacctgggcgacagcgtcaacgcattaaccctcgaacactatccggggatgactgaaaaagcactggcagaaattgttgatgaagcgcgtaaccgctggccgctggggcgcgtcactgtgattcaccgcatcggggaattatggccgggcgatgaaatcgtttttgtcggtgtcaccagtgcgcatcgcagcagtgcgtttgaagccgggcagtttattatggattatctcaaaacccgcgcaccgttctggaagcgcgaagccacgccggaaggcgaccgctgggttgaagctcgggagagcgatcagcaggcggcaaaacgctggtaattttttgttagccggataaggcaccgctgcgtccggcaatttcaccgctcagtacatacgtttacgctgcgtcgatgcacagcctcatcattttgcagtatccttaagatattccttatatcttcaggagatcgtcatggacagattcccacgttctgatagtatcgtacaaccccgggctggcttgcaaacttatatggctcaagtctatggctggatgaccgttggcttgttgctgaccgcatttgttgcctggtatgcggctaattccgcggccgtgatggagctgttgttcactaaccgtgtctttttaatcggtctgatcatcgcgcaattagcattggttattgtgttaagtgcgatgattcaaaagctgagcgcaggtgtaacgacgatgctctttatgctttatagcgcgctgacgggtcttacgctttccagtatattcattgtctataccgctgcttctatcgccagtactttcgtcgttactgccgggatgttcggcgcaatgagcctgtacggttacaccacgaagcgcgatttaagtggctttggcaatatgctgtttatggcgttaatcggcattgtgctggcaagcctggtcaacttctggttgaaaagcgaagcattgatgtgggcagttacctacatcggcgtgattgtctttgtcggattgacggcgtatgacacgcagaaactgaaaaatatgggtgagcagattgatacccgcgacacgagcaacctgcgcaaatattccattcttggcgcgttaaccttgtatctggacttcatcaacctgttcctgatgttgttgcggatcttcggcaaccgccgttaattctttttcaccatcactatcccggccatgtgtcgggatttttttcttactaaaaacgacacttaacaagtaccaggtataaaatatgccttatggacgagcggaagcgttttctgtatccataaatgcaaaagtattttgtatgcgtggttttaaatttattgatggtgaatattaatattttttctaaggataactaaaagaatggaaagttacagccaaaacagcaataaattagattttcagcacgaggccaggatattaaacggtatatggctcattaccgctttaggtttggtggcaaccgcaggactagcctggggagctaagtatatcgaaattacggcaaccaaatatgatagtccaccaatgtatgtcgccatagggttattattactttgtatgtatggcttaagtaaggatatcaacaagataaatgccgccatcgcgggcgtaatatatctgtttttactctctttggtggcgattgtcgttgcaagtttagttcctgtatatgccattatcatcgtgttcagcactgcgggcgcgatgtttttaatcagtatgctggccggtttattatttaatgttgatcctggttctcaccgttttatcattatgatgacgttgacagggttggccctggtaatcatcgtgaatgcggcattaatgagtgaacggcccatttggataataagttgcttaatgattgtgttatggagtggcattatcagccatggacgaaataagctccttgaattggcggggaaatgccatagtgaagagttgtggagtccggttcgttgcgcttttacaggtgcattaacactctattactattttatcggcttctttgggatacttgccgcgatagctataacgcttgtctggcaaaggcatacgcgtttttttcattaaccgtaaatgcacatactaaagaacttaactaaacttcacatcgccgcttcatttttcgcccgtagcttcttcgcctggctttccagcaacaggtaacagatcagcgccagcagcagtgggataaagtaatacagcacacggtaagcgagtagggcggcgataattgtacctttggaggtatgctccccagccagtagtgcgataaacaccgcttccagcacaccgatccccgccggaatatgcacgatgacgccagcaatactactaaccagtaacacgcccagtacaaagaaatagttcacgctttgaccaagtaacagccagataatcgcccccattaccatccagttaacgctggaaatcagcatctgagcgagggcgaatttccaactaggcagcaccagcttttgccctttgatggtcatatggcggtgcttcgcgaaagcgcaaaaccacaaataaaccgcgataatcatcagtaagccaatgccgagaatacgcagcgtagtttgatcgacataccagtgatccggcaactccaccacgcctgcggtaaagataatccctgccagtaaaatgtagcccagccagttggtggtaatactgaggctgaaaatccgcgtaatagtgctaccgggcaaccccagacgagagtacaaacgatagcgcataccaatgccgccgacccaggtactgagcgtcaggttgaaggcgtagcagataaagctcaccagcatcacctggcgcttcgccagtttgtgaccgcagtaaaagcgggcgagcaggtcatagcagccgtaaatcagatagctgacgaccaccagcccgaccgcactaagcagcgcaacgcgattgtagtcgcggatgaccttccagacctcttcccagtccacttttttggcgtagaccaccagcaacacaatcaccgcgataaaaaacagccaggtgaggatcttctttgctaagcgccagcgcgggtgacttttactcatcagggttttacccccgtgttttcagtttctacccgatcctgcgtttccattgtcggttgtgcgggcggatcaacctgcgccagacgtggcgtgtgtgccggaagccagccaaccagcgccgggaagtggcgtaaaaagtggaacgccagcacgcttttggtcaggttccaccaggtgcgtttgggcagcatggtttcatccacctgctgacaatctgcggcaataatgccgttcagattatcgcgcagcgtctggttaaaatgacgatcgtggatgatgacatttgcttcgagattcagactcaaactgagcggatcgagattactggaccctactgtcgcccagtgatcgtccatcaatgccactttgccgtggagcgggcggcggcggtactcaaaaacctgaacgccgcctttaaccagatagttatacagcaagcgcgcaccgactctgacaatcggcatatccggttcgccctgaatgatcagtttgatccgcaccccgcgccgtgccgctttacgcaaggcgtgtaaaaatcgatagccggggaagaagtaggcgttggcgataatcacttcccgccgcgcctgagtgagcattttcaaataatggcgttcaatatcatcgcgatgttcttcgttatcgcgccagaccagcaatacctgcgcttctcccggctggcggttctcttccgctttgtgatgacgtcgccaccagcgtcgtgccgcgctctgtccaggcaggttttccagctcaaactggagaatatcttcgacaatcggcccttcaaggcgtaccgcgtaatcctgtttagcctctggaccgtagctggacatatgctcggcggagtaattcagcccgccaataaaggctatacgcgcgtcgatcaccacaattttgcgatgcatccggcgaaacacattggtgcgcataccaaaaaggcgagggcggggatcgtagtagcggaacactacgccagctgccgtcagttcattgacaaactcatcgctgagatccgggctaccgtagccatccagcaagacttccgctttaaccccgcgttgcgctgctgccagtagtgccgcatgcagttgtttgccgacgtcatcctcaaaccagataaacgtttcaagaatgatgcgttcttgtgcctcgccaatcgccttaaacaccgcgggataatattgctcgccgttttccagcaactggatcttattgccttcgcgccagctacatttcataaatgaatctccgcacttaaaggggcatgatcagaaaggtgtcgccatgtccgcagcggcaacgcggttggcgcgctggcgctggcatttttgacgtagatcctgtccagtcgtagtagaggaaattgcaccggaaacgtgcgcgccgggcgtccgtgggcgcgggtaaaaatctcatccagtccggcctgcacttttaacggatgattagctttttgccgccagtcattgaaatcacccgccaccaataccggttcgccgtccggtagctcattcacccattcggcgagcatcgcaagctgcgcctgacggtgcgcctcacgcaggcccagatgtacgcacatcacatgaatcgcttttccggtcatcggcggcacaatgcggcagtagagcacgccgcgcttttccgcaccatcgacgctaacatcgcgattctcataatgttcaatgggataacggctcagtacggcgttgccgtgatgcccttccgggtatacggcattgcgaccgtaggcaaaatcgctccacatagtgtcggcgagaaactcgtagtggctggtatcgggccagttttccacatgcagcggatgaacttcgtgcgcgcccatcacttcctgcaggcaaacaatatcggcgctgacggtacgcacggcgtcgcgaagttccggcaaaatgaagcgtcggttaaacgcggtaaagcctttgtgaatattgatggtgagcaccttgaagctaaattgttgtgtttgatcgggcataattttcctgtctttgcctcttatctcattgaaatagtgtagtcggcgtcacaaaaaggtgcggtcttacggaattttccgtaaagttcggtactctgagtaagtagagataaattcttcaggagagaagccatgaagtggcaacaacgtgttcgtgtcgcaacgggtctaagttgctggcagattatgttgcatttactggtagtggcgctgctggtggtgggctggatgagtaagactctggttcacgtcggcgtgggattatgcgcactgtattgtgtcacggtagtgatgatgctggtgtttcagcgccaccccgagcaacgctggcgtgaggtggcagacgtgctggaagagctgaccacgacctggtattttggcgcagcgctgattgtgctgtggctgttgtcccgcgttctggaaaacaactttttgctggcaattgcagggctggcaatccttgccggcccggcggtagtgtctttgctggcgaaagataagaagttacatcaccttacgtctaaacatcgcgtacgccgctgattacatcaccttacgtctaaacatcgcgtacgccgcactccctgtcgtggccgttatcaccagtagcggccacaaactattccacacaatatccagactcgcatccttcaaataaatctgcttggtaatgtccgtaaagtggcgaatagggttaatccacgtcaggttttgcagccataccggcatgttttccaccggagaaacgtaaccggaaaggagaatggcgggcatcataaagacaaacacgccgataaacgcctgctgttgtgtactacagagactactaatcaacagaccgaatcccaccaggcttaaaccataaatcaccatcgtaaagtagaacagcgccaggcttccggcgaaggggatttgatacgcccagataccaatcgccagcacaatggtggcctggaaggtggcgacaattaacgccggtacggctttgccgatgaagatctgccaggtggtgagcgggctaaccagtagctgatcgagcgtaccttgttcacgttcgcgggcgacggaaagactagtgacgatcattacgccgatagtggtgatcatggcgatcagactcggcaccacaaaccatttgtagtcgagattcgggttataccagttgcgtaccaccagctcgctgttgttaggtttcggttttccttccagcagctcctgctgataatttttgacgatctgttgcaggtagttggcggcaatttgcgcactgttggagttacgcccgtcgaggatcaactgcaaaggcgcggtctggaaggtatccagtttgcggctgaagtcagccgggaaacgcaccagtagtaacgccttttgtgtgtcgatggttgggcggatctcctgtgggcttttcagcagcagcacatgagtaaaggcgctggcgcgggcaaaacgttgggtcagctccacgctatgctcgccgttatcttcatcgtagatggcgatggtggcgttagtcacttccagcgtggcggcgaacgggaacaggatcacctgaattagcacgggtaaaatcagaatcgcgcgggtttgcggttcgcgcagcaagctctgcaactctttgcggattaacgtccataagcgatgaaacatgctcttctccttaatccagccgacgtttggttttcagccacgtcaggccgataaacatcaccgcgctagcgatcaaaaacagcacgtttaccaccagcaccactggaatattcccggcgaggaacaggctttgcagggtgctgacgaaataacgagcgggaataatgtacgtcaccgcgcggatcaccgcgggcatactgtcgatctgaaaaataaagccggaaagcataatgctcggcagaaaagcggcgttcagggcgacctgagcggcattgaactggttgcgggtaatcgtggaaatcagcagccccatccccagggtactgagtaaaaacaggctggagataaaaaacagaatcagcaggctcccgcgatacggcacgccgagaataaacacactcaccagcatacacagcaacatcgccagcatcccgagaaagtaataagggatcagcttacacagcagcagttccgtgcgggtaatctccgtagagagcagagcctccatggtgccgcgttcccattctcgcgccaccaccaggctggtgagaatcgcgccgatgaccgtcatgataatggtcaccgcaccggggataatgaagtgctggctaatcgccgccgggttaaaccagtagcgggtttgtacatcaataagcggttcaaaagtctgcccgttgtcctccgctcgctgcatttgccagatctgccagatcccttcgacatacccctgtacaaagttagcggtattcggctcactgccgtcggtgatcacctgaatcggtgcggtggcgttggcgcgctccatctgttccgcaaaatccaccggaataaccaccagaccgcgaattttccccgcctgcattttggcgatcagttcctgacggttatcgctgatggtggcgtcgatgtaggggctaccggtcatggtgtgggtgaaatccagcgccgcttcgctacgctgttccagtaaaatcccgacccgcagcttgctggagtcgaggttaatgccgtaaccaaaaataaacagcagtagcagcgggatcactaccgcaatcagccagctactcggatcgcgaacgatctgccgcgtctctttaacgcacagcgcccgtacgcgacgccaggacaggatcgggttactcattgctatgctccttatcccagtcgtggatcaactgaataaaggcttgctccatggtgggatcgggttgctcatcgttagcgctctgtgctttcaaatcgtccggcgtgccgctggcgattaatttcccgcggtacaccaggccgatgcggtcgcaatattccgcttcatccataaagtgggtggtgaccatcaccgtgacgcctttctctaccatgctgttgatgtgcagccaaaattcacggcgggtgagggggtcaacgccggaagtcggttcgtcgagaaacagaatgtccggttcatgcatcaggctacaggccagcgccagccgctgtttaaaacctaatggcagttcatcggtggcgtgggaggcgatacttttcaggccgaacgcctcgctcatgcgggagattttttcgttctgcgcccgaccgcgtaagccatacacaccagagaaaaagcgtaaattctgttcgaccgtcaggttaccgtagaggctaaatttttgcgccatatagccgagatgctggcgcgctttaccggaactctctttcagatccatccccagcaccagcgcctggccggaagtcggcaccagcaaaccgcacatcatcttaaaggtggtgcttttacccgcgccgtttggccccagcaaaccaaaaatctccccacgtttaacggcaaagttgacgtgatcggtggcggcaaaatccccaaatttcttggtcagttctttcgcttcgatcaccgtctcgccgggtgtgccttctaccgtatgtaatattgcgcccagcgggctttcgctggttccggcaccgcccagcaaatcaataaacgcatcttcaaaacgcggcgtagtttcgttgatgttgatttccggcatcccgtcggcatggcgaatatcgtctggtgtggcctcttttttgaggatcagacgtacgcttttcccctgaatcatgccgtcgctgacctgcggcagtttcaaggcgcgttgcaacagtttgcggttgccctcgtgtggactggtcatcagaaagctgcgtccggccatggtttgtgtcagggcttttggttctccctgatacagcaactcgccttcgttcatcagtaacacgtcacggcactgctcggcttcgtcgagatagctggtactccagaggattaacatcccttcgcccgccagctcatgcaccatctgccacagttcgcgccgactgatagggtcaacgccgacgccgggttcatcgagcagcaacactttcggttcgcccaccagggtacaggccagaccgagtttttgtttcatcccaccggagagcttgcccgccaggcgtccggtaaacggcccaagagacgtaaactccagcaggcgagcaaaagtttgcttacgtgcctcgccggtgacgctgcgcaaatccgcgtacagattgaggttctccatcaccgtgagatcttcatacagaccaaatttctgcggcatataaccgagcacggcgtgcagcgcgccgtcgtttttgatcggatcaaagccaatcaccgtggcactgccgctgtcgggtttcagtaatcccgccaacatccgcatcagcgtggttttacctgcaccgtccggccccaccaaccccgtcacataaccggcgtgaatggtacaatcgagcggcgcgacggcgggcttgtccatgcccggaaagcgtttttccaggccgttcagcgtgataacggcatcattcatgtcctgcctcgtcaccgaattgtaccgtcactggcattccctggcgtaacgcatcatcggcgtcggtcaccacaatacgcaggcgatagacgaggtcggtacgcagatccggcgtttcgacggttttcggggtaaattcagcagtcgggctaacgaaaccaatctgcccgtgatacggcttgtccgggcgaccatcggtataaagcagcactttgcgccccggctgggcctggtcaagattacgttcatcaacataagcgcgcacccacaccggacgcgttagactaacggtaaacaccgtgccaccttcattgaggaccgtgcctggctccaccgcgcgcgttaacagcgtgccatcagacggggctatcaacgtactgtcctgtaaattcaactccgcctgcgccagttgcgcctgcgcctgttcgaggctggctttcgcctgagcgatgtcctgttcacggttaccggaacggtactgacgcaatttatcctgtgcacttttcagcgttgcctgcgcctggtcgcggctggagcgggcattttccaggtcatttgcgctaatagtgcggcttttccacaacccttgctggcggttatagaagttctgcgcatagtcataggcggcttgcgcctgtttcaccgctgcggcggcctgagcgatttcttcattgcgatacccggcaagcatcaggtcatactgcgcctgtgccacgctaacacccgctttcgcctgcatcagggcaatctcatacggcttgtgatccagttcgcccagcacctggcccgctttgatagcatcaccttcgtccaccgccaggctttcaacgcgccccccaacacggaaactaagatttaccgtacgaatatccacgttgccatacagcgtcaggccgttatcctggcggctttgataccaccagtagcctccggcaaccacggcggcaagtaccactaccgccaatccgatcacgacaggttttttcatcactacaaactcctttgcgataattacaaactcctttggcttaatccttgcaaaatcaggtcgatatgacaggtcaccgtctggttgatcagttcggtcttttcttcatcgaacgcggtccagccggtacgtaacagaattgtttctttgccaagacggaacgccagaatctcaccaatcaacgcatgggtatgaaggatcatgcgggtgtcattggcgtcgcagccggtccaggcggcaatcaggcgtgtcaggtggctgtgtagcggactaatcacctgttcgtgcaccaggtggtaggctgccgtgggagagagctgctcacgggagataaacttgctgaggttgacggtgtcatcctgggtgagcagcttaatcatgttcctgcaggcgcgaaggatcagttcacggatggcagcccgatcaggctgtggttgcgcgaacaagcgttcggcttcctcggcatgcggacggaactgctcgccaataaaatcggcaatccactgggcgcaggcgaggtacaaatcttctttgctaccgaagtagtaggtgatggcagcgatattctgcccggcctgggcggctatctcgcgagtggtggcgttcattccatattcaccaaactgcgccagtgcggcagcaatcagctgttttttcgcctgttcacccttgattgtcatggcaggattattcatcgcacagtccattcttaatcaaatgattgattaagattatgactccataggggagttgtccagtatggctaagaattttagcaacgccagtcacagggataatttatgcgctgcgtcacaaaaactgctacactccgctccctcatgacattgtggtttttgtcattttccttttcagtatctccctgaaaactacaccggtaacggtcggggcggttcggagtagttatgtctttcgattctttgggtttaagccctgatatcctgcgcgccgttgccgagcagggttaccgtgaacccacccctattcagcagcaggcgatccctgcggtgctggaaggccgcgacctgatggctagcgcccagaccggcaccggcaaaacagcgggctttacgctgccgctgttgcaacacctgatcactcgccagccgcacgccaaagggcgtcgtccggtacgtgcgctcattcttaccccgacccgtgaactggcggcgcagattggcgaaaacgtccgtgattacagcaaatacctgaacattcgtagcctggtggtgtttggtggtgtgagtattaacccgcagatgatgaaactgcgtggcggcgttgatgtgctggtggcaaccccgggacgtttgctggacctggaacatcagaatgcagtgaagctggatcaggttgaaatcctcgtcctcgatgaagctgaccgcatgctcgacatgggctttatccacgatatccgtcgcgtgttaacaaaactacctgcgaagcgccagaacctgttattctccgcgaccttctctgacgatattaaagccctggcggaaaaactgttgcacaacccgctggaaatcgaagtggcacgccgcaataccgcgtctgatcaggtgacccagcacgttcactttgtcgataagaaacgcaaacgcgaattgctgagccacatgattgggaaagggaactggcagcaggtgctggtgtttacccgtaccaaacacggcgctaaccatctggctgaacagctcaataaagatggcatccgtagtgcggcgatccacggcaataaaagccaaggtgcgcgtactcgtgcgctggctgattttaaaagcggcgatattcgtgtactggtggcaactgacatcgctgcgcgcggcctggatattgaagagctgccgcacgtcgtcaactatgaactgccaaacgtacctgaagattatgtccaccgtatcgggcgtaccggtcgtgcggctgctaccggtgaagcgttgagcctggtgtgtgttgatgaacacaaactgctgcgtgatatcgaaaaactgctgaaaaaagagatcccgcgcattgcgattccgggctatgagccggacccgagtatcaaagccgaaccgatccagaacggtcgccagcaacgtggcggcggcggtcgtgggcaaggtggtggtcgcggtcaacagcaaccacgccgtggggaaggtggcgcaaaatctgcaagcgcgaaacctgcagaaaaaccgtctcgccgcctcggcgatgccaaaccggcaggcgaacaacaacgtcgccgccgtccgcgtaaacctgccgctgcgcagtaatcttttatgccgggctatgcccggcatcaggctgatgaacaaacgcaaaactgcctgatgcgctacgcttatcaggcctacgtgaactctgcaatatattgaatttgcatgcttttgtaggccggataaggcgtttacgccgcatccggcatttcacaacaagcacttgtcagcaatttgagaacacgggaaaaaatttatctgttttaccgcccataagccaccgagacgttacttctctatagccaattgttcgcgcaactccattaaaaggtagcccagtcgattcttgcccttaccatgaccaccgtctccccagtaagcatcgttttccgtatgctcaaccagttttgcgggcgcggttgccagcaagagcgcacgcagttctgcatgctgttcgaatttagcgcgaagtgcttttcgcatcacctgttctttgacgctctcccagtttttacgcagaggcttagaacgatcgcgccccatgcgtgcggcgaccataggggaagaaacccgacggatctcttcgcggtatttttcatcaaggaatttttgtgcctgaaaatagtgttcactggtaggccaggttttcccgtcaaccttgatgggccaggcggcaaagttagaaaaatcaccgtagtcatcgctggtgctgtagaaatttatgatggtgtcttgcatgacgtgttggatcctttgtgctcgaacgggcattaaaccgcattatgttggtggttattgcgagccgctttccagaaacagaaaaaccattacccctgaaaaccgaaaaatgccacaatattggctgtttatacagtatttcaggttttctcatggcattaaccgccgcgcttaaagcgcaaattgccgcctggtataaggcgcttcaggaacagatccccgactttattccccgtgcgccgcagcggcagatgattgcggacgtcgccaaaacgctggccggagaagaagggcgacatctggcgattgaagcccccaccggcgttgggaaaacgctctcttatttgattcccggcatcgccattgcccgcgaagagcaaaaaacgctggtggtgagtaccgccaacgtggcattgcaggatcagatttacagcaaagatttaccgctgctgaaaaagatcattcccgatcttaaattcactgccgcttttgggcgtgggcgctacgtttgtccgcgtaatctgacggcgctcgccagtactgaacccacgcaacaggatctgctggcgtttcttgacgacgaactgacgccgaacaatcaggaagagcaaaaacgttgtgcgaagctgaagggcgatctcgatacttataaatgggatggtctgcgcgatcatactgatatcgctatagatgacgatctctggcgtcgtttaagtaccgacaaagccagctgcctcaaccgcaattgttactactatcgtgaatgcccgttttttgtcgctcgtcgggagattcaggaagcggaagtggtggtggcaaaccatgcgctggtgatggcggcgatggaaagcgaagcggtattgcctgacccgaaaaatttactgctggtgctggacgaaggccatcacctgccggatgtggcgcgggatgcgcttgagatgagcgccgaaatcaccgcgccgtggtatcggctacagctggacttgttcacgaaactggtcgctacctgcatggagcagtttcgcccgaagaccatcccaccgctggcgatccctgaacgtttgaatgcgcattgtgaagagttgtatgagcttatcgccagcttaaacaacattctcaatctctacatgcctgccgggcaggaggcagagcaccgttttgcgatgggcgaactgccagatgaagtgctggagatctgccagcggctggcaaaactcaccgagatgctgcgtggcctggcggagttatttcttaacgatttaagtgagaaaaccggcagccatgacattgtacgtctgcatcggttgattttgcagatgaaccgcgcgttggggatgttcgaggcgcaaagcaaactctggcggctggctagcctggcgcaatcttccggtgcaccggtgaccaaatgggcgacgcgggaagagcgcgaagggcagctacacctctggtttcactgcgtgggaatacgtgtcagcgatcagctggaaaggctgctgtggcgcagtattccgcacattattgtcacctccgcaaccttgcgtagcctgaacagttttagccgtttgcaggagatgagtggtctgaaagagaaagcgggcgaccgttttgtggcgctggattccccctttaaccactgcgaacagggcaaaattgttattccccggatgcgcgttgagccttccatcgacaacgaagagcagcatattgccgaaatggcggcctttttccgtaagcaggtggagagcaaaaaacatctcggtatgttggtactgtttgccagcggacgggcgatgcagcgctttctcgactatgtgacggatttacgtctgatgttgctggttcagggcgatcagccgcgttaccgtttagttgaactgcaccgcaaacgcgtcgccaacggtgagcgcagcgtgctggtgggcttacagagttttgccgaagggcttgatttgaaaggtgatctgctcagccaggtgcatatccacaaaatcgcttttccgcccatcgacagcccggtggtgatcaccgaaggggaatggctgaaaagcctcaaccgctatccgtttgaggtgcaaagcctgccgagcgccagctttaacctgattcagcaggttgggcgactgattcgaagccacggttgctggggcgaagtggttatctacgacaaacgcttgctgaccaaaaattatggcaagcgactactggatgcattaccggtatttccgatagagcaaccggaagtccctgaaggtatagttaaaaagaaagaaaaaacgaaatccccacgccgtcggcggcgttaatgatgtgagtcaggtaaggagtcgtaaatggactatcgcaaaatcattaaagagatcgggcgcgggaaaaaccacgcgcgcgatttagaccgggatactgcgcgcggtctgtatgctcatatgctcaatggtgaagtccctgaccttgagttgggcggcgtattgattgcgctgcgtatcaaaggagaaggggaagcagagatgctcggcttttacgaagccatgcaaaatcacaccatcaagctgacgccgccagcaggcaagccgatgccgattgtcatccccagttacaacggcgcgcgtaaacaggccaacctgacgccgttgttggcgattctcctgcacaaactcggttttcctgtggtggttcacggggttagcgaagatccaacccgcgtgctgactgaaaccatttttgaattgatgggtattacgccaacgttgcacggcgggcaggcgcaggcgaagctcgacgaacatcaaccggtgtttatgccagtcggcgcgttttgcccgccgctggaaaaacaactggcgatgcgctggcggatgggcgtgcgtaacagtgcacataccctggcgaaactggcgacgccatttgccgaaggtgaggcgctgcgtctttccagcgttagccatccggaatacattggacgcgtcgcgaagttctttagcgatatcggcgggcgggcgctactaatgcatggtactgaaggtgaagtgtatgctaatccgcagcgctgcccgcagatcaatctcattgaccgtgaagggatgcgggtgctgtatgaaaaacaggacactgctggtagcgagttactgccacaagcaaaagatccggaaaccacggcgcagtggattgagcgttgccttgctggcagcgaaccgattcccgaaagcctgaaaatccagatggcttgctgcctggtggctacgggtgaagcggcaactatcagcgacggcctggcgcgcgttaatcaggcattttaattcttttctcagccggatgagccatgtcatccggcttttaccccaccgcaatatgaaattcctgcatctttattgaccttcccacgcccggcgtgcagcataaaaatacaacaaacacataacataaacaggagttaaccatggaaagtggtcatcgctttgatgctcagacgctgcacagttttattcaggctgtatttcgtcagatgggtagcgaggaacaagaagcgaaattagttgccgatcatttaatcgcggcaaacctggcagggcatgatagtcatggtattggcatgatcccaagctatgtacgctcctggagtcaggggcacctgcaaattaaccatcatgccaaaaccgttaaagaggcgggggcggcggtcacgctcgatggcgatcgcgcatttggtcaggtcgcggcacatgaagcgatggcgctggggattgagaaagcgcatcagcacggtattgccgccgtggcgctacataacagccatcatatcggccgtatcggttactgggcggagcagtgtgcagcggcggggtttgtctctatccactttgttagcgtggtcggtattccaatggtcgcgccgttccacggtcgcgacagccgctttggcaccaatccgttctgtgtggttttccctcgtaaagataatttcccgctgttgcttgattacgccaccagcgccattgcatttggcaaaacccgcgtcgcctggcataaaggcgtccccgtgccgccaggttgcctgattgacgttaacggcgtgccgacgaccaatccggcggtaatgcaggagagcccgttgggtagcctgttgacctttgccgaacataaaggctacgcccttgcagcgatgtgtgaaattcttggcggggcgctttccggcggtaaaacgacgcatcaggaaacgttacaaaccagtcccgatgccattcttaactgcatgaccactatcatcatcaacccggaactcttcggcgcgccggattgtaacgcgcagaccgaagcctttgccgagtgggtgaaagccagcccgcatgatgatgataagccgattttgctaccgggcgagtgggaagtgaacacgcgtcgcgaacggcagaagcaggggattccactggatgcgggaagctggcaggccatttgtgatgcagcgcggcagattggtatgccggaagagacgttgcaggctttctgtcagcagttagccagctaaaaaaaagcccgtccagtggcggacgggcaaacaagggtaacataggatcaatgagggttagagcatatgcgtctgtcggcaaacagacagggaaatacttgtgctggacgtagcgtaaacgcctgatccgtccaacggttcggattttgtaggcctgataagacgcggtagcgtcgcatcaggcatctgttgccggatgcggcgtaaacgccttatccgtcctacgaattacttataaattaccgcagtaccgcttaatttattgttgttggtggcggaagtgatgctgtatccactggcaccggctgccgcggctttctcagccagtttcgcttccagggcatcgagggtggatgcgccatcggcagaaaccacgccgattttattcatgttctgtgcctgggatgccgttaccggttccgccgcgaacacgccaaaactcagagtactaagagccatagcagcaacaacagtattgatagttttcataattaatctctcgcaggtgatttttgtataagtgacgttgtttcgtcgatgtgatgagtatcacgtttttttacgagagataaaatcgaagagaattgaccgccttgttcaaataaattgattgatatctaacctactgataaaccatttatttgttgtacttatgaacttgttttataccgcgtggcagtcacagcagcgttaaaggcacggaatgacacgcaaaatacaaattatactcgctatgcatctcgccagttgtagttaacgtaactggctgtctttgctacctctgcgattatatcctgtataagctggtttttgtaaatctttctcctgctgacaatgaatacataagcgcacgccaggaatggcttcccgacgggcctgcgggatgggggcaccgcactcttcacattcatccaggctttcgccgcgcggaatttcaccccgagcgcgggcaatcgcatcttcaattgtactgttgatctgttcgttgacggcgtcatcgttagcccaaccggatgccatatcgacctccccatatcaatacttgtacagttaagtgtagctaatccagggacgaactcgggcagttcaagcatcagatctcgctccattcccgcagcagattatgataaagattaagcaggctcaggatctcttcactttcgccgtagcggcttttcaggctctgaatattgttgtccagttcaaacagcatggcgcgctttttatcatcgcggatcatgctctggatccacataaaacttgccactcgtacgccgcgggttacgggtgtcacgcaatgcaggctgctggagggatacaacacgagatcgcctgccgggagttttacccgatgttgtccgaaggtgtcattaacgaccagttcgccgccgtcgtagctttgtggatcgcttaaaaacagcgtggcagaaaggtcagtacgcatccagccgttttgtggatggctgcgtactgcgccatccacatggaaaccataggtttcattgttctgatagcgattaaacagcggcgtggaaagggtacgcggcaaggccgcggcaaagaataaagcatgttggttaaccgcgttcagcacctcattttgcagggcggcgtataacgtgctgcgggtgtcgacctgttgattgttcttaacttgcgcaccttgtgcgccggtggtgacgcgtccatccacccattcggcttgttccagttgttcgcgaaaacgagcgacgtcctgtgggcttaacacgccgggaatgtggtacatcatacaatttctccaaaaagtggggcctgcgccccacatctgaatcagaaatgcatattggctgtgagcaagaaggttcttggctcgcccgggtgataacggtagccgctcttgttgatactggcgacgtaatcggtatcaaacaggttgtaaacgtttagctggaagtcgagattgcgattaactcgataccccagtttggcatcggcgacccagtaaccttcggtaaacgctggcgttcccaccgcgccgtcactacctttatgcatactgccgatatagcgtgcgcccgcgccaacagagatatcgtcggttgcctgatattggctccataaggtgaaggcgtgctccggggtatacggcaggctactggaaccatcctgggcaacatctttgccgtttttgatggttgctttttgctgggtatagccgccaatcacctgccacgcgggagtgatattcccggccacggatatctcatagccttcgacgcgtttcttaccgtattggctgtaagttccgtcatcattttgctcaacttcattttcgatatcagtgcggaacagcgcggcggtgagcaacagacgtttatccagaacctgccatttggtgccaatctcgctggtgttggctttttgcggtttaaaatcggtgcggttggcactgttaccgctgccagactgcgcaagggcgaagttgttgccgcccggaggctgctgggaaacggcatagttaatatagacattgccgttttccgtcaggtgatacagcgccccggctttccagttcatcagattgccgctcttggcggtgtcgacggtggtgaccggagaaccttttgccacaccagttgggcaggtgatggcaccgcgtccgctgccgccgcaggcggtggcactgtcatattcagtatgataattatccagacggatcccgccgttcagctcaaaatcacgggtgatttgcagcgtatcaaaggcgtaaattgcgaaggtatccgtctgaccattggcgtttgcgccgttgcgcgtcaggccgccgggatgaatgctgctgtcaggatgataaatatttaccgcgggtaacgtcaccggattaacgccgtagttagtctgcgtttcacgggtaaattccacgccggtactgacatcatgaccgatagaaccggtatagaacgtgctggtcaggttggtctggttggtgagaattttattactcacatctttggtattcgccgtgcgactccaggtccagctattcacatcgctggtgggctgagtaatattgctcgccccgcccataatcgccgtcatcaggtaatcctgctttacgcggctccaacgggtagtattgcgaatggtggtgttatcgttgatgtcgtgctcaaaacgcatggtggcggtgtcggtggtgctatcgtcgtaatcggaatccgtgccgtaaaagttatgagtatcaacttttccggaatgattcagggccgccgttcccgcagatggggcagaatagcccggcaaaccgatggtcggaatgccgccgtctggcgtgttgtgctgggtgacatgcagataattaagatacaaacgattcgctgtaccaaggccaaaagcgacagaaggggcgacgccgtaacgctcatttttgactttgtcgcgtccggcatcgtgcgttttttcgcccattacattcaggcgcaccgcggtggtatcaccaatgacctgattgacgtccagcgtgccgcggcggaaccaggcgctgccaatactggcggaggcgtcaatgccggaatcattgcgcggctgcttgctgatcatattgatgctgcctgtcggtgcgctgcgcccgtagtcggtgccggacggccctttaatcacttcgacctgctcggtattgaaggtgtcgcggctgacgctgccgatatcgcgaatgccatcaatataaatactgttagaggtatcggcaccacgcatataaatggcgtcgccagtggtggagttaccgttctcacccgcaaaaaacgcacccacgccggggacgtttttgagcgcgtcggtaaggttggttgcgccctgatctttaatcacttgttcagaaattaccgtcatcgtgcgggtagtatccgctaccggacggctgaatttcggatcggcagattgttgtggcgcataaaggctaggcgtacttgcttcgacaaccagcgtgtcatccgcgttagtttgcccttcggcggcgagtgcctgagccacaggcgtgatgccaatacaaagaccggcaaagaacgtgaggctatgaaattgtctggcagggaaattgcgattgttttccattttgcaggtgactttttcttatatgttgaaattttcactgccacgagaaagcctctctgcggatgcgatgccactgttaatcccgtgatagtgctcgtgaaagtgataataattttgataagcattatcacttggagcgattttctatcacccattgcgcgaaaaagaaatacatttatttacattgagttcatatttgatgttttttgattacaaaacagacgaaaactgcatccagaggcgaatgcagttacgttggtggggttatttgtagatggttgcagtaccgaacatctggtcatttccgcctgcggaattaatgacataacctttcgcgccttgttcgcgcgctttttctgccagtttatcctccagatcgcttaggttacttgcgccagttgcgctaacggtaccggcgggccgtagctgaccgctgtccaggttactcatcggttgcgcggcataagccgtgagagagattccgctcaggacggtggcaatcagtagtgtgaggcactttttcataatgacatcctcataaatacaacgggtagtgcctgataagtgtaggtcgcctgcgcgatgcaaatgacgcaaaaaattgacagagatgtgcttattttttgaacgatatatttttacaaaataagacaaatcaatgacatgcataatgctgatttttatgatgaattgccataaaccatagccatgttaaggttttggggaatgataaacgcagccagatatttaccctgtcgcgttatgcgggtatcttacgccgctgcttaaaggagaatgctatgtccgcccagaaaccggggttgcatccgcgcaaccgtcatcacagccgctacgatctcgccacgctttgtcaggtcaatcctgaactcaggcaattcctcacgcttacacccgccggggagcaaagcgtagactttgccaatccgctggcggtgaaggcgctcaataaggcgttgctggcccatttttacgccgtagcgaactgggatatccccgacggttttctctgcccaccagtaccgggccgggcggattatattcatcaccttgccgatttactggcagaagcaagcggaacaattccagcgaatgccagcattctggatatcggcgttggtgcgaactgtatttatccgctgattggcgtacatgaatatggctggcgttttaccggtagtgaaaccagcagccaggcgttaagcagtgcgcaggcgattatcagttctaatccggggcttaaccgcgccattcgtctgcgtcggcaaaaagagagtggggcgatttttaacggcatcatccataaaaacgagcaatacgacgcgaccttgtgtaacccgccattccacgattccgccgctgcggcacgggcaggtagtgagcgtaaacgccgtaacctggggctgaacaaagacgatgcactgaactttggcggccagcaacaggagttgtggtgtgaaggcggtgaagtcacctttatcaaaaagatgattgaagagagcaaaggcttcgcgaagcaggtgatgtggtttacaagtctggtatctcgtggtgaaaacttaccgccgttgtatcgtgccctgacggacgtgggcgcggtgaaggtggttaaaaaagagatggcccaggggcaaaagcagagtcgctttattgcctggacctttatgaacgacgagcagcgccgccgttttgtcaatcgccagcgttaaagcgttggttcccccggcggtaacggttcagccggggtcgcgcccggagcaggcagcacctgataagtctgcactggcgcgcgaacgcccgccaggtcgaaatgttttttcacctggctgtcgagggcaaagcgtaccgtccactgtttgagtggcagcgtggtgaagctaacacgcagtgtaaacgcggtattgcttaagccgacaatcccggcaaaattcggttcaccaataatcagcccgcgaatttcttcgttttccattaattccgctaccgcatctttcagtgcctgattggctttatcagcatcttcatggcgatcaacatcataatttgccaccacgctaccaatgccgcggacaaagttagcaaaggtggttatgctagaccacggaatgatgtgatacgccccggtatcctgtcgtacgcccacggagcgaatgctcatccgttccactgtgccggtcaacggcccgatagtcaccaaatctccagtgttcatgccgttttcaaactgaataaataccccggtgataatatctttcaccagcgtttggctaccaaagctgatagccagacctaatgccccggcacctgccagcaatggcgcgatattgacgccgatttcgctcaacacaatcatgatggtgatggtactgataatcaccgccagcgcgttacgaaacagcgtaagcagggtacgcgtgcgggcgctgggtagcgggcggccatgaatatcgctagccagccggttttcgatcaaactggcgagcaccgtccagccaaccgcgctgaagaaaagaatgagtgcgatacggatcaggatatctacggttttctgccccgcgccgttttgcagccagttccagaaatcgaacaatccccatgcgctcaacagcaacattaccgccacgcagactgtcagaatacgcgccgttttcagcgccgcgctcagccagccattcaaccgtttttgcagctccggatagttacgctgagtatgtgggctgagagtgatggttttcgccagccagcgggaaaacataccggaaacaaacgctgcgataccaataatcgccaggctgcgcaccgttgcacccatcataaatttcaggctgttgcccggatcgaacaagctaaagaaaaacagcacgataaaataggcgcttgccagccagtgccacaccagcgcaaaggcgcggataaacaggctgaaaaaggccaggctatgctccgcgaagttgagcaaatgctgggtaatctcttttttattacgaaagatcaggtacaacgcccagacggtcatgcacagcataatgatgacgttcgccagcgcacctatctgtacattcacctgattagagataatcggcacggccacaatcaggccataacctatcaaactgcttaaccagctcaggcgacgactccagtaacgggcgctctcgtcctgaatcgtgaacgggcgcagctccgccacgtttgggcaaaaaatcaggcgtagtacggctttgaaaaattcaatgagggcaaaggcgttgagaaacaaactttgttggaaagcgatggtgcgactgcctgcattcaggttgtcgcttaatacctggccgacaaataatgtcagggccagtaacagcaggtcgataataaacgccccgataatcatcgccggaagctgcaaccagttactgcgctcacgatttttttgccgcgcccactgacccattttgcgatacagcggcagtgcgcacaggcgaatcagccagtaaaaaccaaacactaataccgctaacatactaaaatgggtcagcgcattgctgaaggtttgtggattaaacggcttatgcggggagccggtgatattgcgataaagttgcccgaagcgggcggaaagggcttcaccataatggcggctgacttcggtgaccttttgcagcacggtttgctcttcgaccagcgtcggcggcactatttttggtaccggttcagcagggggcgtagcggcaacggtgcgcaactggtcgatcaactctttacggctggtgtcattatccagcacatccgccagtgcgccataggccgcttttttttgttcgatatccggttccggggccggttcagtcgtactgtccgttgtcgttgtggttgtaacgccgggtatggataccgcgtgggcaggtgcgcccagcaggcagaagaggatgaacaggatccaccgcatgactcctccagtgagaaaatagagcaaaaagataagtatagatgctggaggaggggcgattttaaatgagaggaatctggtgtgcctccctttcgggtgaaagggaggaagggatattaagcaggttgctgacaacgtgcgggcttttttgccggatgcggcgtgaacgccttatccgtcctacaagttcatgcaattttaataagttgccagatatcctgtaggcctgataagcgtagcgcatcaggcaatgtgtcttattaagagacgtgctgcaaaaattcctgcaagcgctggctcggcgggttcttgatcaacacctgcggattgccatcttccgcaatccggcctttgtcgataaagatcagccggctagctactttctcggcaaaaccgatttcgtgggtcacgatcaccatcgtcatcccttcttcagccagatcctgcataaccttcagcacttcatggcgcagttccgggtcaagagcggaagtcggttcatcaaacagcatcattttcggcttcaccgccagcgcgcgggcaatcgccacacgctgctgttgaccaccagaaagttcggaagggtagtgatgtgcacgttctgccagaccgactttcgccagcagctcacgtgccagtttttccgcctcttctttgttcgcgccacgcacgcgtagcgggccaaacatgacgttttccagcgctgtcagatgcgggaagaggtaaaactgctggaacaccatacctgcttcctggcgaatcaggcgctcgtcaactttcggatcgttaaccttcaggccatcgacaatcagatcgccggaggtgatttcttccagtttgttgatgcagcgcagcagggtgcttttaccggaaccggacggcccgataatcaccacgacttcgccctgggcaatgttcaaatcgatattgtgcagcacctgggttgggccaaagtgcttggagacgtttttaaattcaatcacaggattttcatccttctttccagacgacgcagaataaagctcagcaccagggtaataatcagatagaacaccgccacggcgctccagatctcaagggcgcggaagttaccggcaataatttcttgcccctgacgggtcagttccgccacgccgatcacaataaacaggctggtgtctttaatgctgatgatccactggttacccagcggcggcagcatacgacgcagtgccagcggtaaaatgacgtagcgaatggtttcccaacgactaagaccgagcgccagtcctgcttcacgaaaacctttgtggatagacagcaccgcaccacgcgtgatttccgcaatatacgcgccggagttgatcatgatggtgaccaccgccgcagtaaatgggtcgatgcgtaagtcgttaaacgccatcggcagggcgaaataaataaacatcacctggacgacgataggtgtgccgcggatcacttcaataaagaccagcgcgacgtggttggctatccaacctccgaaggtgcgtgcaaaacctgccagcaatccgattaccagaccgcctgccagaccgaggacgctaatccacagggtcattttggcaccttcaatcagaagcggaatggcaggccagatggcactccagtcaaactgcatatgttgttcctgttaccgtggtgtaaataatcaaattcagggtaattaatggccccggagcgggtttgcgcccctcaccctaatcctctccccataggggagagggaactgccagtgcgttttacaggtgtagcgttattatttcggttcagtaccgaaccattttttgtagatttcgttgtaagttccgttctcgcgcagggttttcaacgcgccgttgactttgtcacgcagctcgtcgctacctttcgggaacgcaataccgtattgctgcgcttccagagagtcacctaccgctttgaactgaccgttaccggcggttttgatgaagtacagaatgtttggcgtatcgtgcagaacggcgtctgcgcggttggtgcccagttccatataggcgttatcgatgttcgggaactgacgcagatctttagttttgatgtttgctttcgcgtaatcaacggagccagtaccgctcttcacagcaaccactttcccgtcgagatctttcacgcttttcacatcgttattgttagctttcaccatcactaacaggccgcttttgtagtagccgtcagagaaatcgatcgcttttttacgctcgtcggtgatggtaatgcccgccagcgccagatcgacgtttttggtttgcagtgccggaatgatcccactgaaatccatcggcttcagttcgtaatccagcttcagctctttagcgatggcagcccacagatcaacgtcaaagcccacatatttatcgccctgtttaaattcaaacggaacgaaggcggtatccgtcgcgacaactaattttttatccgcggcatgagaagaaaccgcaaaagccagggtcagtgcagccagactaacttttaatacagacttcatagcatttccttttttctatccacgggacgatcccctgcgtgacattcacatatatgaaaaaatcgtgccagttttgcaactccttgatttttcgagatgcggcaaaaacgtgatgcacgatttatagggcaataccctgaagatgcaccattctggggcaccaatctggtgcgctaaaattgtgcactcaacacagtgattatttagcgtaaaacctgatgaaaaaacaatctttatgtaacgattgtgtgatgatgtggatacaaaaaatttacttaatcagctggagatagcagatggatgcactaaataagtgcgttgaggtgggctgcaaaacaaaacggcctcctgtcaggaagccgcttttatcgggtactaaagttctgcaccatcagcgatggatttattcgatgttagactcgataaaccacaggaatttatccaggtcgcgagacgcggcggtcaggatatctgcggtgtcgtcatctttcgcttcgccaatcgctttgcgtacgtcattagcgacgattgcgtaacggtcagccagttctttcaggtgatcctgaacgttgtggatgtccagcgggtaacttttcagcggggttttgctgttgataacttgagtggtccccagagctacaccgcccagctgcactgcacgttctgccatggtatccagatgatcgatcagtgcggtgcggaagccatccagcatttcatgtacggcaatgaagttagcgccgcgcatgttccagtgcgcttgtttggtaatcaaagaaagatcaataaactggataacctggcgattcagcaactctactgttgcttttttctcgctgtcggagacatcgttgcgggtataaagcagattggtcgctttacttttaactaatttagcggtactcataatttcatatcctcttgatgttatgtcccagtaattaacgagattaagtatagcaccggctatgtgttccgctattctggctgttcctatcacactaatagtggtaacaagcgtgaaaaacaaaactaataaagattcaatgagttagatatattgataagaacaattcttatttatctgctcgccaggaattttcggaataaatatgcttttgcataattcgatatataaagacggtgtagaggaaaagtagcgagaaattctgcatggttatgcataaccatgcagaaatgtaaatttaattaatgtctaattcttttattttgctctctttgcgtactgtcagcgtagaccccatactagcggcgatgatagcgccgagcgccagtagctgtatgggtgtcagtgtttctccgaggaaaatcatcccggaaacggcagccagcgccggttccatgctcatcagcgtaccaaatgtccgtgttggcaaacgggtgagggcaatcatttccaggctataaggcagagcggtgctgagaatagcgacagccagacccaatggaataacgctccagtgccagagtgcttcaccagcctgaagcgctccaattggcacgaaaattaacgctgcaatcaagctaccaattgccaccgtcgcagggccatgttccgctcctgcgcgttgcccacttaaaatgtaaatagcccaacaagccccggcccccagtgccagcgcacagccggttaaatcgacatgggaaacgtcttgccccagcggtagcaggaaccacagaccaagaaccgccagcacaacccagacgaaatctaccgggcgacgagaagagaacagcgccaccgccagtggtccggtgaactccagcgccaccgcaatacccagcggtactgtctgaatagaaagataaaaaagataattcatcccacccaggctaacgccgtaaaacaacagcggtaaccgttgctctttggcaaagcgcagtcgccatggcttaaagaacgcgatgaggatcagcgttcctaatgccagacgcagcgcagtgacacccggtgcgcccaccagaggaaaaagactcttagctaagctggctccaccctgaatagacgccatggcaacgagcaatatgactattggtaaccagaccggcattttacgtaaactaccaggcatcctttctcccacaaatatctagacttaagtaaagcgtggagtgtactggatatacccaatgctggttgagcatttgttgaaaaaattttcccccgttttgactaaaatgcgccaggattgatggaatcattagtctggtgattaggaataatctggatgaatgacagggaaaacatgcgtaatacttacgcagttctctgaaaaagtgatttaaatttagatggatagcggtgtatggaaacgttctgttacatgaaatggcccgttagacatcacaaatcgcgaagagtttcccattaatttttgatatatttaaaacttaggacttatttgaatcacatttgaggtggttatgaaaaaaattgcatgtcttagtgcactggccgcagttctggctttcaccgcaggtacttccgtagctgcgacttctactgtaactggcggttacgcacagagcgacgctcagggccaaatgaacaaaatgggcggtttcaacctgaaataccgctatgaagaagacaacagcccgctgggtgtgatcggttctttcacttacaccgagaaaagccgtactgcaagctctggtgactacaacaaaaaccagtactacggcatcactgctggtccggcttaccgcattaacgactgggcaagcatctacggtgtagtgggtgtgggttatggtaaattccagaccactgaatacccgacctacaaacacgacaccagcgactacggtttctcctacggtgcgggtctgcagttcaacccgatggaaaacgttgctctggacttctcttacgagcagagccgtattcgtagcgttgacgtaggcacctggattgccggtgttggttaccgcttctaatcactttggtgatataaaaaatccgcctctcggggcggatttttgtttttaaggtttcgggtcgaaaatatcggttccgagatggttgtaatccaccttctgtaactggaagttggtgatgtatatcggcccggctttcttctcagatataaacgggtatttgatgttaatttccttcgctttaatccccgtccactgggagaaaaagcctaagaagtcattggcactgcggcgggctttaatcacacgatgcgctttatcgtcgctggaaatgaccataaaaggcacctggaaattttgctgatatttatcatcatgggcaaggtattgcacgtctttaccgcgctctttaaaggccagaccgtggtcagaaaagtaaaccaggctgaagctgctgccgctgttgcgtaactgatcgtacagcttgcgcagtaaatcgtccgtttgcgtcatggtatagagatagcagctcgtttctttgctttgcacaaaggtttcgtattttccttgtgtcctgtcgcaggcctgcggatgactgcccatcagatgtagaacaatcagctgcggttggctgtgctcttgcgccagcacttgagcggtcatatccagtaacgcttcgtctttggtgtttttatctgcttcaaaattaccttctttcaggaagtacacttcatctgctcgtttggcgatgctggcgatagcggtatcgtattcgccgatttgaccctggttggaaaaccaccaggtctggaagcccgcgcgatttgccagggtgacaaagttatcctgaaactgtggtttgccatcgacaacgcgattgagcgttaagccaaggcttttctgcgtggagccactggcggcaatgtagtcagcaaatatcaaaccgttaacgctgctggcaaacggggtattgtcccagtgaccgccaaaggcaccgagggcatcgcgacgcgcgctttcaccgatcaccaccacataggtctgatacttcggcttaacggcagtgaccgtccaggtatctttcattccggaaagttttgccatccgttcttgctcttcaatcacctcgttattattgacgatgacatccttagcaaaacgaaataccggatagccagtatctttcagtttaaatacgccaccccaggccaggttttgcacgggagcaacaaaaaatgtcgccacactgaataccagacacaggctgtcgaaggtattccagcgcgctttttcattctctttttttcgcctgattgctattacgccgagcgcaaaaataaataagccgaccaggtagctgtaccacggaaaaatcgtcaggatttcggtgctctcttccatattggtggagtgcaatgccagcaatgtattgaaattaggcgcgccgtaggcctgagcaaaagggaaataacaagccgccaccaggctactgacaccgaccagaactttttgtacgcgaggcaatgttcgccatagcaaaagcaaaatagccgtaaacgcagcggtgtagagcaaactgaaggggtaacctaagccgaggttaattaataggctctgtaaaaagtagaacgcagtccacgggctaaatacccggctacgggtaacaaggctttctttgagggttaaattcatatgccactatcgtaacaaacgccatgtgcttaccctggcgtcaagggtcaatacctgcaagagtgcgtgaagagtggaaaggggtccgcatccgcgagccgcaatatacgcagggctgcaagaagatagagcgagccgccgtagtggtcaactactgacgaacaaatcttttgcgaaggggattgcaaatccgacaaaaagtggggtttttcagaccaaaacgcgttatgcctgcatgaaagcaggagtgaagcggcgtaccgcgacgccgctatttatcggaaggtttatcttgctgcggtttgttgttgaccatatcgcacaacatagagagcagcattaaccgtactttaaagggagaatgactaaacacgcgcatacacctcttgaactcattcataagacctcctgacttgctaatcccgtcgatccttgaggggtgattgcattacatacagatatagcacaggctatattatatagctattgctaaaacgttaattttttgtaccttcgcaactctggtttacaatgtgcgcacgaaatgagaacgctatgtatgcgtcaccataatgaggaagcacaatgagtcgtcgcgcaggtacgccaacagcaaaaaaagtgacgcagttagtgaacgtggaagagcacgttgaagggttccgccaggtcagagaggcgcatcggcgcgagcttattgatgattacgttgagctgatttctgacttgatcagggaagtgggggaagctcgtcaggtggacatggctgctcgtctgggagttagccaaccgacggtggctaaaatgcttaagcggctggcaaccatggggctgattgaaatgatcccctggcgtggcgtgtttttaacggcagaaggagagaagctggcgcaggaaagccgcgagcgacatcagatagtcgaaaatttcttgttggtgttgggcgtcagtccggaaatcgcccgtcgcgacgcggaaggcatggagcaccatgttagtgaagagacgctcgacgcttttcgtttgtttacccagaaacacggtgccaaatgagcctgccttttttacgcacgctgcaaggcgatcgtttttttcagttattaattcttgttggtatcggattaagctttttcgtgccctttgcaccgaaatcctggcctgctgctatcgactggcacaccatcatcaccttaagcggcctgatgctgctgaccaaaggtgtggagttaagcggttattttgatgtgctggggcgcaaaatggtgcgccgctttgctacggagcgtcggctggcgatgtttatggtgctggcggcggcgctgctttctacctttctgaccaacgatgtcgcgctgtttattgttgttccgctgactatcacgctaaaaagactgtgtgagatcccggttaatcggctgattatttttgaggcgctggcagtcaacgctggtagcctactgacgccaattggcaacccgcaaaatattcttatctggggacgttctggtcttagctttgccggatttattgcccaaatggcaccgctggctggcgcaatgatgctgacgctcctgctcctgtgctggtgttgtttccctggaaaggcgatgcaataccatacgggggtgcaaacaccggagtggaaaccgcggctggtgtggagttgtctggggctgtatatcgtctttctgacggcgctggagttcaaacaagagctgtggggactggtgattgtggcggcaggctttgcgctgctggcacgtcgcgtggtgctcagtgtggactggacgctgctgctggtgtttatggcgatgtttatcgacgtccatttactgacccagcttccagcgttgcaaggcgtgttgggtaacgtgagtcatctatctgaacccgggttatggttaacggcaatcggtttaagccaggtgatcagtaacgtgccgagtaccatattgttgctgaactatgtgccgccgtctttattactggtatgggcggtaaacgtaggtggctttgggttattacccggaagcctggcaaatttgattgcgctacgtatggcgaacgatcgccgcatctggtggcgtttccatctctatagtataccgatgctgttgtgggcggcgttggtgggatatgttttgttagttatactcccggccaactaaggtctggcaaataaaaaaggcggattatgagtccgccttttgctttaagttttgaagattaattcagacgaaccggcatcccggagcggtttttaatcgcttcatcaagaacaacctggtcaacatctggctgaccggtcactgtctgcacgctcttcgtcagggtaattggcacaatttcctgaccttcaaactgggcttcggtggtagacagcgggttatggacttcaatataacggctgccgtctggctcggtggtcgcttttaccggctcatcaataaactgtacgcgggtaccgaccggtactttctcgaacaggaatttgatgtcttcgttacgcagacgcacacaaccatgacttacacgcaggccgataccgaagttggcgttggtgccatggatagcatacaggcgaccgatatagagtgcatacagccccatcgggttatccggacctgccggaacgacagccggaagcggttcgcccgcagcgcggtactctgcgtgcattttggcggtcggcgtccaggtcgggcctgcttttttacgctcaactttggtggtccagttgataggcgtatctttgcctaactgaccaatgccgatcggcagcacgataacggtgttggtccctttcggatagtaataaagacgcatctcagcactgttaatgacgatgccttcatgaacggtatccggcaggatcagctgctgcggaatgttcagtacagtaccgcctttcggcaggaaggtatccacacccgggttcgcttccatcatattggaaagccccatctggtactcggcggcaaaatactccagcggctgagtgttaccttcaggaatggtgatcacctgattctgaccaaccaggcgactcccgtcggttggcagaggataagttaccgcagaggcggtactgcaaaagccgacaacagcgaaggccgctgcgaataatgttttcaatttcatattcatgttaagcgagattttgtgcctggcaggccattgggttgagaatattagagtattggaagcgcattataagttcattccagctcacagtgaaatcagatgtgtacgaaatcacattttttgcctttggcttgagtgtagaccttaagcgaggagcaggatcttctttcagacttatggcataatgcgcggtttgtcatatctcttttcaggatacgcctgtgttagtttccagtaacgtcaccatgcagttcggcagtaagccgttgtttgaaaacatttccgtcaaatttggcggcggcaaccgttacggcctgattggcgcgaacggtagtggtaaatccacctttatgaagatcctcggcggcgaccttgagccgacgctgggtaacgtttccctcgatcccaacgagcgcattggtaaactgcgtcaggatcagtttgcctttgaagagttcactgtgctggatacggtgatcatggggcataaagagttgtgggaagtgaagcaggagcgcgaccgcatctatgctttgccggaaatgagtgaagaagacggctataaagtggccgatctggaagttaaatacggcgaaatggacggttactctgcggaagctcgcgccggtgaactgttgcttggcgtgggaattccagtggaacagcactacggcccgatgagtgaagttgctcctggctggaagctgcgtgtgcttctggcgcaggcgctgtttgctgatccggatattctcctgctcgacgaaccgaccaacaacctcgacatcgacaccattcgctggctggaacaggtgctgaacgagcgtgacagcaccatgatcatcatcagccacgaccgtcacttccttaacatggtctgtacccacatggcggatctggattacggcgagctgcgcgtttatccgggtaactacgatgagtacatgacggcggcgacccaggcgcgtgaacgtctgctggccgataacgccaagaagaaagcgcagattgctgagttgcaatctttcgttagccgctttagcgccaacgccagcaaatctcgccaggcaactagccgcgcgcgccagattgataaaatcaaactggaagaggtgaaagcctccagccgtcagaacccgttcatccgttttgaacaggataagaaactgttccgtaacgcgctggaagtggaaggtctgaccaaagggtttgataacggtccgctgtttaaaaatctcaacctgctgctggaagtgggtgaaaaactggcggtactgggtaccaacggcgtcggtaaaagtacgctgctgaaaacgctggtgggcgatctgcaaccggacagcggcaccgtaaaatggtctgagaacgcgcgcattggttactatgctcaggaccacgaatatgagtttgaaaatgatctgaccgtgttcgaatggatgagccagtggaagcaggaaggcgatgacgagcaggcggtacgcagtattctcggtcgtttgctgttcagccaggacgacatcaaaaagccagctaaagtgctttccggtggggaaaaagggcggatgctgtttggtaagttaatgatgcagaagccgaacattctgatcatggacgaaccgaccaaccacctggatatggaatccattgagagcctgaacatggcactggaactgtatcagggcacgctgatctttgttagtcacgaccgtgagttcgtaagctccctggcgacccgcattctggaaatcaccccggaacgcgtgatcgactttagcggtaattacgaagattacctgcgtagtaaagggatcgagtaagtgattatccgtcaccccgatactgtcggggtgacggcggctgatgacaaatgcaaaatagcctgatgcgctacgcttatcaggcctacgcagtacctgcaatatattgaatctgcaggactttgtaggccggataaggcgttaacgccgcatcaggcattaacaaagcgcatttgtcagcaatctgagtaacgtcgaatcgattttcttaatcccacatcaattcacttccattaattctcaaacatccatgcccaacgctcgcttaccgtgaatgttgaggtcggcaagcgtaaagcgtccttcccagtttgtttcatagtcctcgcgcgggaagtcgcccgggcttgcgcctttttccagtgcggccttcaccttgtgcgcgtaggcaagatttttctcgcacatcggtgccgcaggaatgtacatcacgttgccccaaccttgttgattttcaacgggggcaacggaatggatgacgtcgcagtgccaccagacggagtctccggcttcgagttttggaatgctggttaacgcctcaatcaacagtggatgccattgctcacttaccggcaatactcttccgggcgctacgccgcacagttcatcctccggcacatcatcaagcagcggacgtaacagtacgtacgccatagcttcaggaatgggcacgacgtgcagcagcccctgaccaggcagcatatcagagagcgctgtccagccctggaatgtccgaaacacggaacatttggtggtgttgtccaccgtgtactcttcaacttccgtacgatgtgccgcatgccagggatcatattgcgccagattgccattaaagacgttggcgaaaacgcgctgatacgctggaagcagccagcgttccagtgccccggagtcggtatgcgctccaagacctttggaggtcgttccgggcggacggcggcggatacggtcagggtagatgacgctcacatccgggttaaaccattgctttccatcactttcaaatgtccacagacgattgagaaagctctgcgcattcgccatttcttcactctggcgggcctgcatttgcgcctggctccagtagatggggtaaatctcgggacgactagcgctgagcgtcccgaagaaattatcgccggggcctttgtagacctcgtcaaagcggttgcggtccagatagtccagcatgctctgatcccagcctagcgcttgttcgcgggggaaatggccttttatcaccgcacaaccgcgacgtttaatctgttcgcgctgctctgcagtaacatgacctgctttgatatcggcataagacagcaccggccagacggcatcgccctgtgctttgagtgcgttgatttcagccactcgcgtggcaatgtcatcgcttagctgattaaagatctgctggacgtcgccaagctgcgcccgcagcgcgtgcttcatctgacggatagctgctttgtgatcggcaggcaatgtgtcgctggtaaaagtagaagccataaccacctctcattaactttcattcgaaaccattctgatttgcatgtgacaatataagttataaataagttaatgcaagtttaatgatttgatgtgatgtacaggatgtaaaaagaagggaaaaccggagcgcacggctccggtagagaggtcagctgttaaaaggggatgtgttatccagcaccgcctgaatcacattcagcgcgccttcatgattattatcatcggtagcgtaacgggcgatttgtttaatgttttccgcagcattgcccatcgcaaaggaataacgcgccattttcagcatctccgcatcgttaccgctgtcgccaatcgctaccacattttgcggactcagatcccagcgtttcagtaaccggctaataccgtttgctttatgtagaccgggaataatcaggtcgataaagccaaaaccactggtaacgggtttcataatgccatcgagcgctacgtgcagtttgtcgatcactaacgggatttgttcatccggcaggttgaggctaaacttgaacagtacgtcgtcaatctcctgataatcttttacaggtttcaggcgatggtagtgttttgccatcagtgcgacaaatgcttcgggggcattttcgctgacatatgcactttgcagaccgcaggcgacaaaattgagttgcttatcttttagcaactcgccaataacaatccggctttcatgtcgggtcagttcgccgtggaacaactgcttgccatgttcgtaaaccagtgcgccgttttccgcgacaaaagagatctcatcctttagctcaggaaagaaactaataagctggtaatactgattaccgctggcaacaacgaacttaatgccgcgctttttcagttcctgatattgcgccataaaacgtggttggttgtacgttttggcgtcgttaagaaaagtaccgtccatgtctgtgacgataacttttacgctcataggtgtgctcctggctcgaaaatgaaaccgtaacagtgtaataacaatgtgacgcagagcacaaattatatttcgaatgaaagtaaggatgaaattgatgatgtgaatgatttagcccggcgacgacgccgccgggccgaggagattacagcatatgttcagtacgggcgatgatatcgtcctgagcgtctggagagagcgcggtgaagaacgcggaatagcccgcgacacgcactaccagatcgcgatactgatcgggatgttttttcgcatccagcagcgtttcgcgggaaacgatgttgtactgaatatgccagcctttatgcacttcaaagaaggtacgcagcaggatcatcagtttctgcttgtcagattcgttctccagcgttgccggattcagtttctggttgagcaacacgccgccgagaatcgctgccgtaggcagtttacccacactgccaatgaccgcagtagggccaagatggtcagtaccggaggccgggcttgcgccttctgccagcggggtgtgggctttacgcccgtccggtgttgccatagtctgcgcgccaaacggtacgttagcggagatactactcgtacccgcgtaatagttgccgccaaccggaccacgaccgtagcgcggattatggtactgtttcagttcgtcgatataggtctgataagcgcgagccagcagcgtatcgacagtatcatcgtcgttgccgtacttcggcgcaccgttaatcagccgctgacgcagctgctcgtgagtcaggccgtcgaagtcatctgccagtgcggcagcaagctgttgctgaccaatcgcaccttgttcaaacaccagtttcttcactgccgccaggctgttgccgaggttggcaatgccgacctgcaggccagaaacccagtcatatttcgcgccgccttgcttgatacttttcgctcgctcaatacagtcatccaccagcgcgctgcagagaatatcgtgcacgttctcttccagcatggtgtcgacgacatattcgatttcgatacttttgcgggtgtagtaacggatttgcgtatcccacgcgtccatcacttcatcgaagttgttgaagttacctgcgctcaacgctttttcttgtggcaggaacactttgccgctggtggcatcatgcccgccttccagcgccgccagcatcacgcgggcgaagttgataaagctcatgccggtacagcgatagccccatttgccaccgacggcggtttctatacaaccaatcgctgcgtagtcataagcgtcctgcggttcaataccgagtttaataaattccgggatcacgatttcgtcgttgttgaacgccggcatcccgaagccgcaacggatcacctgtacgcaggcgtcgaggaaatcgttgctcattcctgcatggtaacgcacgctgaggttaggctgagtggaacgcaggcgaccgcaggattcgaggatcgcgtaagagagtggattcaccgcgtccattggttgaccatcaaccagattttgcccgccaatagtgacgttctgatacagcggacttcccgcagaggctttactgtgactgccggagcggatcttgttcacttccagcagtttcagccagcagctatgcagcatctcgatggcgtgttcgcgatccagcgtctggttgagttcaacgtcgcggcgatagtacgggtagagatactggtccatacgaccaaagcttacactgtgaccgttagattcgatctgcaaaatcaactggatgaagtaacacagttgcagcgcctgccagaaagtctgcggcggctggtgggcgataagatcgcagttttctgccatcgccagcagttcatcgcgacggctttcgcgggtttcggtcgcggccatttcacgcgccagggcagcgaaacgttcaatgtgttcactgactgccaccagcacgatatcaatcgctttcaggaattgctcaccgtgtaaatcttccagcaccgtcaggttgatgcggctgcgacgttccgctacttcctcgcgcagaccatcaagccctttttccagcagcagcgggaaattcaccgccaggtgcgcatcgccggaggtcatattgccttccgctttaatgattccggtcgccagcagacctttttgctcatcggtaaacatgccgtagcagcgatcctgtacggtctgaccgcgccaccacgggcacacttcatgcagaacgcgtttgttctcttcgctcaccgcaaagccagcaccgggacgatctgccagatcatcaatctctttttcgatccagctgacagtatattccgggaagatcggcgcggcgcgaacttcgcttgcctggttgccaatgatcaactcatcgtgtttgatccagatggtgcgattcgccaggtgatgcgccagtgccagcgcgcgacgtaccgggatcggcttatcgagatgttgttgatacatctcggtatagtgctgcgcgcgctcggtacagactggcggtttcacaatatgcaccagcgcatttttgtgcgctttaatgcggtcgctgagcgtgtccagtttcagtgtggtcatggttgttatcctcgtaaggtcgcggttaaccctttctggcaggcatactgctgggcaaagtcgagcagttctggcgcatcaagcggtttttccggggcgtcatagggcagattaagtaagtgatatttgttgatgcccagcgtgtggtagggcagaaaatgaatttcgccaacgtgcagctcgtcggcggcaaaatcggtaatggcttttacagaggtttcgtcggcattaaagccctgaatcagcggcacgcggataatgatttttttgcccgctgcggcgagttttttcaggttatccagcactctggcggcgttaccgtcggtccactgtttaaacggcgcgtcggcaacgtgttttaaatcggcaagaaacagatcgatatagggcagagaaggggcgatatatttccacggcacatgcagacaggtttctaccgcagtatgaatgcctgcctcgtggctggcttgcagtagcgccatcgccatttccggctgcataaagggctcaccaccgctaagcgttaaaccgccgccgctgcgatcgtaaaacggtttatcgcgcagaacggtcgtcatgatctcctcaacgcttttcacttcaccacacacggttaatgcctgtgtcggacagcagtcggttaacgccgtcagatgctccggggttaacttttcccgatgaataagcaaaccattcagcgcgcgctcaatcacttccggcgcggccttagcgcacagctcgcagccttccagacacagtcgtgcgtcatacagcagatcctgcgtgcgggcgcggctttccgggttctgacaccagcggcagcccaggctacagcctttaagaaatacgaccgtgcggataccggggccatcatgggtgctgtagcgctgaatattgaaaatcatagttgcctctctatttcgttcaagcattaaaatactttcgaatgaaagttagattgatgtgcgtcaactgttcagagagttttcccgtgatagtctacattcagacaaaaagtacattttgaggatggttatggaactgtatctggatactagtgacgttgttgcggtgaaggcgctgagtcgtatttttccgctggcgggtgtgaccactaacccaagcattatcgccgcgggtaaaaaaccgctggatgttgtgcttccgcaacttcatgaagcgatgggcggtcaggggcgtctgtttgcccaggtaatggctaccactgccgaagggatggttaatgacgcgcttaagctgcgttctattattgcggatatcgtggtgaaagttccggtgaccgccgaggggctggcagctattaagatgttaaaagcggaagggattccgacgctgggaaccgcggtatatggcgcagcacaagggctgctgagcgcgctggcaggtgcggaatatgttgcgccttacgttaatcgtattgatgctcagggcggtagcggcattcagactgtgaccgacttacaccagttattgaaaatgcatgcgccgcaggcgaaagtgctggcagcgagtttcaaaaccccgcgtcaggcgctggactgcttactggcaggatgtgaaagtattactctgccactggatgtggcacaacagatgattagctatccggcggttgatgccgctgtggcgaagtttgagcaggactggcagggagcgtttggcagaacgagcatttaaccggacgttctgcatcctcataaattgctgatgacgtggcggagtgccgcgtcttatcaggcctggaggtggcaattactgcccacacacctcacaccccggattacgcatcagtttcatttcgcgaaactgacaggtcatcgcatcgtacatgacgattttcccgctggccggtttgccataacctgccagcattttgatcgcttccattgcctgcaagctaccaattacgccgatcaacggtgccattacgcctgcttccacgcaggttaatgcattttcaccaaacaaacggctaaggcagcgatagcacggttcaccgtcctgataagtaaagacggtgatttgaccttccatacgaattgccgcgccggaaaccagcggtaccttcgcggcaaaacagcctgcgttcagttgattacgtaccgcaacgttatccgtacagtcgagcaccagatcgtgttcagcaatcaatgctgcaagttctgcgtcatccagcagtgcattgactggcgtaatcgcgatatgtgggttgatccgcgtcagggcgtcacgggcggattccaccttcggttgcccgaccgtggcatcactgtgcagtgtctggcgttgcagattgctgaggctaaccgtgtcgaagtcgagcagcgtcaggttaccgacaccggcgcttgccagatactggctggctgcacagccgaggccgcccaggcccactatcagcacgcgagaatctttcagcgcctcctggccgtcaaaatcaaagccgcgcagaatgatttgccggttgtagcgcagcatctcctgatcgctgagttccgccattacaggcctccgaacaacgcgttaaacggttctacttccacccattcgcccacttccacattgccgcgatcgcgttccagcacgataaagcagttgccgaggctaaaggagctaaatatatgactaccctgatgtccggtggtcgtcacttccagttcgccatcggcgttgcgttgcagcacgccgcgctggaaatcaagacgtcctggcgtttttttcaggcgggacgctgtgcgtacgcgctggcgcgcgggcaggccgctggcggtgttaccgcttagttttgccagcaaaggctgtaccagttgatagaaggtcagcgtcgcactaaccgggttgcccggcaggccgcagaaccagctattgctgagtttaccgaacgcgaacggtttacctggtttaatcgccagcttccagaaggcgatctcccccagctcttcaagaatcgttttggtgtaatccgcctcacccacactaacaccgccggaactgatcaccacatccgcctggctgtcggcttcaataaatgcggcgcgcagggcatggggatcgtcgcggataatccctaagttaattacctcgcatcccaactgttctaacatcaggtgtacggcgagacggttggtatcgtagatttggccgtcgcccagcggctgaccgggcaactggagttcatcaccggtagaaaaaagcgctacacgcactttacgaatcaccggaacttcggcaatccccagactagcaattactggcagctctgcggtagtcaggcgagttcccgccgggaaaacaaccgcacctgcagagatatcttcaccgcgacggcgaatattttgcccgctacgcacttcagcagtaaaacgcacgccattgtccatttgttcagtctgctcctgcatcaccaccgcttcgcagccttccggcaccggcgcaccggtcataatacgaatgcaggtacccgcaggccattcaccatggtatggctgaccggcaaaggatttaccggcaacgggcagcggttgcccggaggcaatatcggctaaacgcaccgcgtagccgtccattgcggagttatcaaaccccggaacatcaagcgggctaacgacatcgctcgccagaatacgaccaaaacactgtaccagtggcagcgtttcctgggcggtcagtggggtgacgcgagaaagcatctcattaagcgcggtgtcgaggctcatcaatccggtggtaaattccatgaaaacactcctgcggaggcaaaatcgaatttgcctattatgtcagaaaaacgccacagactgtatgccacctcgggcgtagcgctgggtcctgcctttacatgccatatccatctttctatattcaaaaattgaatgagtaattcataaaaattctgatatttatagcaaaagtggcgaaccacccttaatggacgaatactatgggcaaagcagtcattgcaattcatggtggcgcaggtgcaattagccgcgcgcagatgagtctgcaacaggaattacgctacatcgaggcgttgtctgccattgttgaaaccgggcagaaaatgctggaagcgggcgaaagtgcgctggatgtggtgacggaagcggtgcgtctgctggaagagtgtccactgtttaacgccggaattggcgctgtctttacgcgtgatgaaacccatgaactggacgcctgtgtgatggatggtaacaccctgaaagccggtgcggtggcgggcgttagtcatctgcgtaatccggttcttgccgcccggctggtgatggagcaaagcccgcatgtgatgatgattggcgaaggggcagaaaattttgcgtttgctcgtggcatggagcgcgtcagcccggagattttctccacgtctttgcgttatgaacaactactggcagcgcgcaaggaaggggcaaccgtcctcgaccatagcggtgcgccactggatgaaaaacagaaaatgggcaccgtgggggccgtggcgttggatttagacggcaatttggcggcagccacgtccacaggcggaatgaccaataaattacccggacgagttggcgatagtcccttagtgggtgccggatgctacgccaataacgccagtgtggcggtttcttgtaccggcacgggcgaagtcttcatccgcgcgctggcggcatatgacatcgccgcgttaatggattacggcggattaagtctcgcggaagcctgcgagcgggtagtaatggaaaaactccctgcgcttggcggtagcggtggcttaatcgctatcgaccatgaagggaatgtcgcgctaccgtttaacaccgaaggaatgtatcgcgcctggggctacgcaggcgatacgccaaccaccggtatctaccgtgaaaaaggggacaccgttgccacacagtgatgaacttgatgccggtaatgtgctggcggttgaaaatctgaatattgcctttatgcaggaccagcagaaaatagctgcggtccgcaatctctcttttagtctgcaacgcggtgagacgctggcaattgttggcgaatccggctccggtaagagtgtgactgcgttggcattgatgcgcctgttggaacaggcgggcggtttagtacagtgcgataaaatgctgttgcagcggcgcagtcgcgaagtgattgaacttagcgagcagaacgctgcacaaatgcgccatgttcgcggtgcggatatggcgatgatatttcaggagccgatgacaagcctgaacccggtatttactgtgggtgaacagattgccgaaagtattcgtctgcatcagaacgccagtcgtgaagaagcgatggtcgaggcgaagcggatgctggatcaggtacgcattcctgaggcacaaaccattcttagtcgttatccgcatcaactctctggcgggatgcgccagcgagtgatgattgcgatggcgctgagttgccgcccggcggtgctgattgccgatgagccaaccaccgcgctggatgtcactattcaggcgcagatcctgcaattaatcaaagtattgcaaaaagagatgagcatgggcgttatctttatcactcacgatatgggcgtggtggcagagattgccgatcgggtactggtgatgtatcagggcgaggcggtggaaacgggtaccgtcgaacagatttttcatgcaccgcaacatccttacacccgtgcgctgttagctgctgttccgcaacttggtgcgatgaaagggttagattatccccgacgtttcccgttgataagccttgaacatccagcgaaacaggccccccccatcgagcagaaaacggtggtggatggcgaacctgttttacgagtgcgtaatcttgtcacccgtttccctttgcgcagcggtttgttgaatcgcgtaacgcgggaagtgcatgccgttgagaaagtcagttttgatctctggcctggcgaaacgctaagcctggtgggcgagtctggcagcggtaaatccactaccgggcgggcgttgctgcgcctggtcgaaagccagggcggcgaaattatctttaacggtcagcgaatcgataccttgagtcccggcaaacttcaggcattacgccgggatattcagtttatttttcaggacccttacgctagcctggacccacgtcagaccatcggtgatagcattatcgaaccgctgcgtgtacacggtttattgccaggtaaagacgcggctgcacgcgttgcgtggttgctggagcgcgtgggcctgttacctgaacatgcctggcgttacccgcatgagttttccggcggtcagcgccagcgcatctgcattgctcgcgcgttggcattgaatccaaaagtgatcattgccgacgaagccgttagcgcgctggatgtttctattcgcgggcagattatcaacttgttgctcgatctccagcgtgatttcggcattgcgtatctgtttatctcccacgatatggcggtggtagagcggattagtcatcgtgtggcggtgatgtatctcgggcaaattgttgaaattggtccacggcgcgcggtcttcgaaaacccgcagcatccttatacgcgtaaattactggcggcagttccggtcgctgaaccgtcccgacaacgaccgcagcgtgtactgctgagcgacgatcttcccagcaatattcatctgcgtggcgaagaggtggcagccgtcagcttgcaatgcgtcgggccggggcattacgtcgcacaaccacaaagtgaatacgcattcatgcgtagataacattcaggcggagaataaaatggcaagagctgtacaccgtagtgggttagtggcgctgggcattgcgacagcgttgatggcatcttgtgcattcgctgccaaagatgtggtggtggcggtaggaagcaatttcaccacgctcgatccgtatgacgcaaatgacacgttatctcaggccgtagcgaaaagcttttaccaggggctgttcggtctggataaagagatgaaactgaaaaacgtgctggcggagagttataccgtttccgatgacggcattacttacaccgtgaaattgcgggaaggcattaaattccaggatggcaccgatttcaacgccgcggcggtgaaagcgaatctggaccgggccagcgatccggcgaatcatcttaaacgctataacctgtataagaatattgctaaaacggaagcgatcgatccgacaacggtaaagattaccctcaaacagccgttcagtgcgtttattaatattcttgcccatccggcgaccgcgatgattagtccggcagcgctggaaaaatatggcaaggagattggtttttatccggtgggaaccggaccgtatgaactggatacctggaatcagaccgattttgtgaaggtgaaaaaattcgcgggttactggcagccaggattgcccaaactggacagcataacctggcgtccggtggcggataacaacacccgcgcggcaatgctgcaaaccggtgaagcgcagtttgctttccccattccttacgagcaggccacactgctggagaaaaacaaaaatatcgagttgatggccagtccgagtattatgcagcgttatatcagtatgaacgtgacgcaaaagccgttcgataacccgaaggtccgtgaggcgctgaattacgccattaaccgtccggcgctggtgaaagttgcctttgcgggctatgcaacgccagctactggtgtggtaccgccaagtatcgcctacgcgcaaagttataaaccgtggccttacgatccagtgaaagcgcgcgaattactgaaagaggcgggatatcccaacggtttcagtaccacgctgtggagcagtcataaccacagcaccgcgcagaaagtgctgcaatttacccagcagcagttagcgcaggtcgggattaaagcccaggtgactgcgatggatgccggacagcgggcggcagaagttgaaggtaaagggcaaaaagagagcggcgtgcggatgttctacactggctggagcgctagtaccggcgaagcggactgggcactaagcccgctgtttgccagccagaactggccaccgacgctgtttaataccgcgttttacagcaataaacaggtggatgacttcctggctcaggcactgaaaactaatgatccggcggaaaagacccgcttatataaggcggcgcaggatatcatctggcaagaaagcccgtggatcccgctggtggtagaaaaactggtgagcgcacacagtaaaaacctgaccggtttttggatcatgccagacaccggcttcagctttgaagacgcggatttgcaataagcaacgcagggagtggaatgcttaattacgttatcaaacgcttactggggttgattccgacgctgtttatcgtcagcgtgctggtgtttttatttgtccatatgctgcccggcgatccggcgcgattgattgccgggcccgaagctgatgcgcaggttatagaactggtgcgtcagcagctggggttggatcagccgctgtatcaccagttctggcactatatcagcaatgctgtgcagggggattttggcctgagcatggtgagccgtcgtccggttgccgatgagattgccagccgctttatgccaacgctgtggctgaccataaccagtatggtctgggcggttatatttggtatggcggcgggaattatcgccgccgtctggcgtaaccgttggccggatcgattgagtatgaccattgcggtgagcgggatcagctttccggcatttgctctggggatgcttttaattcaggtattctccgttgaactgggctggctgcctaccgtgggagcagacagttggcagcactacattttaccctccctgacgctcggcgcggcagtggccgccgtgatggcgcgctttacccgcgcgagctttgtcgatgttttaagcgaagattatatgcgtaccgcgagggcgaaaggggtgagcgaaacctgggttgtcctcaaacacgggctacgtaacgcgatgatcccggtagtgaccatgatgggcttacagtttggctttttgctcggtggttccatcgttgtggagaaagttttcaactggccgggacttggacgcttactcgttgactccgtagaaatgcgtgattacccggtgattcaggcggaaattctgcttttcagcctggaatttattcttatcaacttagtggtggatgtgctttacgccgccattaacccggctatcaggtacaagtaaggatgcgactatttaactggcgacgtcaggcggtgttaaacgccatgccactggtcaaacctgaccaggtacgtacaccgtggcatgaattctggcgacgatttcgccgtcagcatatggcgatgaccgccgcattattcgttattttattgattgtggtggccatttttgcacgctggatcgctccctatgacgccgaaaattattttgattatgacaatctgaataacggaccttctttgcagcactggtttggcgtcgatagtctggggcgtgacattttcagccgtgtcctggttggtgcgcaaatcagcctggcggcgggcgtgtttgccgtgtttatcggtgcggcgatcgggacgttgctgggcttgctcgctggatattatgaaggctggtgggatcggctgatcatgcgcatttgcgatgtgctgtttgccttcccgggtattttactggcgatcgctgttgttgcggtgttgggaagcggcattgctaacgtgattattgcagtcgccattttttccatccccgcgtttgcccgcctggtgcgcggcaacacgctggtgttgaaacagcaaacctttattgagagtgcacgcagtattggtgccagcgatatgaccgttttgttgcgtcatatcctgcctgggaccgtctcttctatcgtggtgtttttcaccatgcgcattggtaccagcattatctctgccgccagcctcagttttctcggcctcggtgcgcagccgccgacaccagagtggggagcaatgctcaatgaggctcgagcggatatggttatcgcgccgcatgtcgctgtttttccggccctggctatttttctgaccgtactggcgttcaatttgttgggcgatggtttacgcgatgcgctggatccgaaaattaaaggataattacgtttgaatattgcttgaaagggtaatcacctcacaggaaattattgccctaagcaagtgttgtaactttctgctgattttgtagaatcgggtaatttggttaaaaagccgcagcaagggacaatttttgcagcggcacagcgttcagatagttattttgttaaatgtattaacatgctgagtttatacgaaaagataaagataaggctgataattttatttttattggcagcactgagttttattggtctttttttcatcattaactatcaactggtaagcgagcgcgcggtaaaacgtgccgatagccgctttgaacttattcagaaaaacgttggctatttctttaaagatattgaacgtagcgccctgacattaaaggacagtctgtatttattaaaaaatacagaggagattcaacgcgccgtgattcttaaaatggaaatgatgccatttttagacagcgtgggactggtacttgatgataataaatattatctttttagccggagggcgaatgataaaatcgttgtttatcatcaggaacaagtaaatggaccgcttgtcgacgagagtgggcgggttatttttgccgattttaacccaagcaaacgaccgtggagcgtggctagtgatgactctaacaacagctggaatccggcatacaattgctttgatcgtccgggtaaaaaatgtatctcttttacgctacacatcaacggcaaagatcacgatttgttagcggtggataaaattcatgtcgatttaaactggcgatatctgaacgagtatcttgatcaaatcagcgctaatgatgaagttctatttttgaaacaaggccatgagatcattgccaagaatcaactcgctcgtgaaaaactgattatttataatagcgaaggtaattataatattattgattctgtcgatactgaatatatcgaaaaaacaagtgcggtgccaaacaacgcattattcgaaatctatttttattatcctggcggtaatttattgaacgcaagtgataaacttttttatctgccgtttgcgttcattattatcgtattgctggtggtttatttaatgaccactcgtgtgttccgtcggcaattttctgaaatgacagagctggttaatacgctggcgtttttgcctgacagtacggatcaaatcgaggctctgaaaattcgtgaaggcgatgcgaaagagattatcagcatcaaaaatagcatcgcggaaatgaaagatgccgaaattgaacggagtaataaattgctcagtctgatctcttacgatcaggaaagtggttttattaaaaatatggcgattattgagtctaacaataatcagtatctggctgtggggatcatcaaactgtgtggtctggaagccgtggaagcggtgtttggtgttgatgagcgcaataaaatcgtcaggaaattgtgtcagcgaattgccgagaaatatgcgcaatgctgcgatatcgtgacattcaatgccgatctctatttacttctgtgtcgggaaaatgtacagacatttacccgtaaaatagcgatggtaaacgattttgacagcagctttggctaccgcaatctgcgcatccataagtctgccatttgtgaacctttgcagggggaaaacgcctggagttacgcagaaaaactgaaactggcgatttccagtatccgtgaccatatgttcagtgagtttattttctgtgatgacgcgaaactcaacgaaatagaagagaatatctggattgcgcgtaatattcgccatgcaatggaaattggcgaactattcctcgtctatcaaccgatcgttgatattaacacccgcgccattctgggcgcggaggcgttgtgccgttgggtgtctgcggagcgggggatcattagtccgctgaagttcattaccattgctgaagatatcgggtttatcaatgagctgggttatcagattattaaaacggcaatgggtgaattcagacattttagtcagcgtgcgagcctgaaggatgatttcttactgcatattaatgttagcccctggcagttaaacgaaccacactttcatgagcgttttaccaccatcatgaaagaaaatggcctgaaggcgaacagcctctgtgttgagatcactgaaaccgtgatcgagcgaattaatgaacatttttatctcaatattgaacaactgcgtaaacaaggggtacggataagcattgatgactttggcaccggtttgagtaacctgaaacgtttttatgaaattaatccagacagcataaaggtggacagccaattcaccggcgatattttcggtactgcgggaaaaattgtgcgcattattttcgacctggcacgctataaccggatcccggtgattgcggaaggcgtagagagcgaagacgttgcgcgcgaattaatcaaattaggatgtgttcaggctcaggggtatctgtaccagaaacccatgccattctccgcctgggataaaagtggaaaattagtaaaagagtaatttacgtatgtccagaatcaataagttcgtacttacagtcagtctgctgatttttatcatgattagtgcagttgcctgcgggatctacactcaaatggtaaaggaacgggtgtatagcctgaaacagtccgttattgatactgcttttgcggtggcaaatattgctgaatatcggcgtagcgtggcaattgatcttatcaacacgctaaatcccacggaggaacagctgttggttggtttgcgcacagcttacgccgacagcgtttccccctcttatttgtacgatgtcggtccttatctgatttccagtgacgaatgtattcaggtaaaggagttcgagaaaaattattgtgcagatattatgcaggttgtgaagtatcgacatgtcaaaaatacagggtttatctcttttgacggtaaaaccttcgtctattacctctatccggtaactcacaatcgtagtctgatatttttgcttggtctggagcgtttttctttactgagtaaaagcctggcgatggacagcgagaacctgatgttctctctatttaagaacggtaaaccggtgaccggtgatgaatataatgctaaaaacgccatcttcaccgttagcgaagcgatggagcacttcgcctatttgccgaccggattgtatgtatttgcgtataaaaaagatgtttatttgcgggtttgtacattgattattttctttgccgcattggtggcagtgataagcggtgccagttgcctctatctggtacgcagagtgattaatcgtggtattgtggagaaagaagccatcattaataaccattttgaacgcgtactggatggcgggcttttctttagcgctgccgatgtcaaaaaactctacagtatgtataacagcgcgttcctggacgacctgaccaaagcaatgggcagaaaatcctttgacgaagatttaaaagcgctgccggaaaaaggcggttatttgtgcctgtttgacgtcgataaattcaaaaacattaacgacaccttcggtcatttgctgggcgatgaagtgttgatgaaagtggtgaaaatccttaaaagtcagatcccggtagataaaggtaaagtctaccgcttcggcggtgacgaatttgcggtgatttatacgggtggaacgctggaagagttgctaagcattctaaaagaaatcgttcatttccaggtgggaagcattaatttaagtaccagtatcggtgtagcacatagtaatgaatgtcctaccgtcgaacgcttgaaaatgctggcggatgagcggctgtataagagtaagaaaaacggcagggcacagattagctggcagtaatcattattcgcaggccggacaaatgattttgcccggcctgaattaattaaacccggctaccccacaaatcgtactcatcggcgtgctcgactttcacacgcaggatatcacccggcttaacgttggtttcaccattgagataaaccgcgccgtcgatttccggtgcatctgccatgctgcgaccaatcgcgccttcttcgtccacttcgtcgataatcaccagaatttcacggcccactttctcttgcaggcgctcggcggaaatctgctgctgcagctgcatgaaacggttccagcgttcttctttaacttcttccggaacctggtcaggcagggcattggcgtctgcaccttcaaccgggctgtatttaaagcagccaacgcgatccagacgcgcttctttcaggaagtcgagtagcatctggaaatcttcttctgtctcgccagggaagccgacaataaaggtactgcgtagggtcagttccgggcagatttcgcgccactgtttgatgcgcgccagttggcgatctacagaacccggacgcttcatcagtttgagaatgcgcgggctggcgtgctgcaacggaatgtccagatacggcaggattttgccttctgccatcagtgggatgacgtcgtccacatgcggataagggtaaacgtagtgcagacgtgtccagatccccagtttgcttaactgttcgcacaggctgaccatgctggtttttaccggctcgccgttgtggaagccagtacgatgtttaacatcaacgccataggcggaagtatcctggctgatcaccagaatctctttaacgcccgcatctaccagacgtttcgcttcacttaacacttcgccaatcggacggctcaccaggtcgccgcgcatagacggaataatgcagaaggtgcagcggtgattacagccttcagaaattttcagataggcataatgacgcggcgtcagtttcacaccttgttctggcaccaggctcaggaatgggttgtgtttcggttttggcacgtagtgatgaacgtgctccagaacctgctcatagctatgaggcccggtgatttccagcactttcgggtggacttcgcggatctgatcttcttttgcccccagacaaccggtcacaataaccttgccgttttcattcaacgcttcaccaatggcttccagactttcttgtaccgcgctgtcaataaagccgcaggtgttgacgatcaccatgtccgcatcgtcatagctcggtaccacgtcataaccttcagtgcggagttcggtgagaatacgctcactatcaacaaggtttttcggacagccaagggaaacaaagccgattttcggctggggagttactttgctcatagcttaaaaaatattcagttacaggaaaggtcagggcagggattctacagagttctggataaaatttgtatcgcaatctcattcgctggcggaggcgaaggaaatgtaaattttgttaattcggcgtgaagaattgatcctggacagcattttgctcaaaaaatagccatactatttaattgcaacaaggctgggaagaggaggatcgaagtatgttcgttgacagacagcgaatcgatctgctgaaccggttgatcgacgcacgcgttgacctcgccgcatacgtgcaactgaggaaggcaaaaggatacatgtccgtcagcgaaagcaatcatctacgagataacttttttaaactgaatcgcgaactgcacgataaaagcctgcggttgaatcttcatctggatcaggaagagtggagtgctcttcatcatgctgaagaagcattagcgacagccgcagtatgtttgatgagtgggcaccatgattgcccgactgttattaccgtcaacgccgataagcttgaaaattgtctgatgagcttaacgctgagtatccagagcctgcagaagcacgccatgcttgagaaggcctgaaaactaagggggagaaagcgtctcccccttcatgtttaagtttttgtaaaaatgaatttgttatctcctccactgactacgctttaagccagagtcaatccggaggcgttatgcatcgacaatcctttttccttgtgccccttatttgtctttcttccgctctctgggcggctcctgcaacggtaaatgtcgaagtactgcaagacaaactcgaccatccctgggcactggcctttttacccgataatcacggtatgttaatcactctgcgcggcggcgagttgcgtcactggcaagcaggaaaaggattatctgcgccgctttccggagttccggacgtttgggcgcacgggcagggcggcctgctggacgtggttttagcgcctgattttgctcagtctcgccgcatctggttaagttattccgaagttggcgatgatggcaaagccggaactgctgtgggttatggccgcttaagtgatgatctcagtaaagtgaccgacttccgcaccgtctttcgccagatgccaaaactgtctaccggcaaccattttggcgggcggctggtattcgacggtaaaggttatctttttattgctctgggcgaaaacaatcagcgcccgacggcgcaggatctggataaattacagggcaaactggtgcgtctgaccgaccagggcgaaatcccggatgataatccttttataaaggaatccggtgcgcgcgccgagatctggtcttatggcattcgtaatccgcaaggaatggcgatgaatccgtggagtaatgcactgtggctgaatgaacatggcccgcgcggtggtgatgaaattaatatcccgcaaaaaggcaaaaactacggctggccgctggcaacctggggaatcaactatagtggctttaagataccggaagcgaaaggggagatcgtcgccgggaccgagcaacctgttttttactggaaagatagccccgctgtgagcggcatggccttctataacagcgataaattcccccagtggcagcaaaaattatttattggcgcgctgaaagataaagatgtcattgtgatgagcgtcaacggcgacaaagtgacagaagatggccgtattttaacggacagagggcagcgaattcgtgatgttcgcactggacccgacggttatttatacgttctcaccgacgagtccagtggggaattacttaaagttagcccacgcaattaactaacgggaatcatcaccactttgcgcactgcggggcgttcagtgagttgctgataccagcgttgcagatttggacgcggtgtccaggtcaggccaacgttaaacaaattgtagatgaacggtgcgatagcgatatcgcccacaccaaactcgtcgccagagaaccattttacttttgccagttccgcatcgagcagggcaaacagggcgtcgcactctttgcaactggcatcaatggcggcctgatcgcgctcttccggtggtgttctgactaatcccatcaggatcccgcgatgagcattactgagcgtctggtttgcccagtccatccatttttccgcttccgcacgacgtgccggactgtcgatccacaggcgtttttgcccgtactgtgccgccagatagcggacaatggcgttactttcccaaagaatgagatcactttcgtcgtcacgcaacaacggcaccagcccgttagggttcatcgccagaaaatcagcatcgtgatttatcccaaactcacggcccgcgagaatttgctcataaggtagttccagttcttcgagcgtcagcaatactttttttacgttagtactattattccgaccccacagcgtaatcatactcaccccttttccgacaggcagccacaggctgaacaggactccgatggtgaagtaaagttaacttttaagcaacagctggcaaaaaaatgacaccagaagcagcgaagcggcaggatattgcataaactttaaaaactttaccaacttacggtttctttaagtttgtgtgtgcgttattaatcaccaaacttatcatacggcgatataacgtattttttttgaatggatactcgggtggcatttatgacgcaatactcctctctccttcgtggtcttgcagcgggttctgcatttttattcctttttgccccaacggcattcgcggcggaacaaaccgttgaagcgccgagcgtggatgcgcgtgcatggattttaatggattacgccagcggtaaagtgctggcagaaggcaatgcggatgagaaactggatcccgcgagcctgactaaaatcatgaccagctatgtggttgggcaggcgcttaaggccgataagattaaactcaccgatatggtgacggtcggtaaagatgcctgggcgacgggaaatccggcactgcgtggtagtagcgtaatgttcctcaaaccgggcgatcaggttagcgtggcagacttgaacaaaggtgtgattatccagtccggtaatgacgcctgtattgcgctggctgattacgttgccgggagccaggagagttttattggtctgatgaatggttatgccaaaaaactgggtctgaccaacactaccttccagacggtgcacggcctggatgcgccggggcagttcagcaccgcgcgcgatatggcattgctgggtaaagcattgatccacgatgtgccggaagagtacgccattcataaagagaaagagttcaccttcaacaaaattcgtcagcctaaccgtaaccgtctgctgtggagcagcaatctgaatgttgatggcatgaagacaggaaccacggcaggcgcgggatataatctggttgctagcgctacccagggcgatatgcgtttaatctccgtagtgttgggggcgaaaaccgaccgtatccgttttaatgagtctgagaaattattgacctggggtttccgcttctttgaaaccgtgacgccaattaaacctgatgccacctttgtgactcagcgcgtctggtttggtgataagagcgaagtgaatctcggggcaggtgaagcgggcagtgtgaccataccgcgtgggcagctgaaaaacctgaaagcgagttatacgttaacggaaccgcagcttaccgcaccgctgaaaaaaggtcaggttgtcgggaccattgatttccagcttaacggtaaatccattgagcagcgtccgctgatcgtgatggaaaatgtggaagagggcggattctttggtcgggtgtgggatttcgtgatgatgaaattccatcagtggttcggcagctggttctcttaatcttctgataaccggatggcgcgaaacgtcatccggttatacgtcattaatacatcaacttaatgcgctgcgtctgcgcgtacttcacatactcatcttccgggcaacaatcgctcaccacaatatcaaagcgtttcaggtcacccatgcgcgccggacgcaccttgccaaatttactgtggtcgacaaccagcacatgcttttgcgccatgctcatggcccagtgttttaccggcaactcttcaagattaaaacaggtagcgcctttactgacatgcacgcccgccgcagaataaaaagcgatatccgggcaaaaattattcagcgtttgctgaaaatcgatgggtttgaaaatggcgttgctggcgtgaaattcaccaccgcaaagaaacgcgcggcaatggggtttctctttcagcgccagaaaggtatttaggctataacaaacggcggtaaaagggatttcattatcaatcgcttcaataatccacggcgtggtggtgccacagtcaaaaaagagggtctgatcgggttctaccagcgtcgcagccagttttgccgcccggcgtttttcttccaccaggcgggatttttgatcgcttaacaggtaatggctggcactgcgcggttccagaacaatatagccgccgagcaaaacgacgggcgcactgtggttgttcagatcgcgacgaatcgtcatctcgctaaccccaagcagggcggcggcgtctttaagatgtaacttatcgctgcgttttaattcttgcagcagctgcccgatacgctcttcgcgacgtgtttccataatccctctgaatagttattgaagcgagccgctcaatactacactttttagcagagatcagtcacgcacccagcctttgcggatcggtaatgcaaaacagacgcgataccagctttgcagacgttgatagagtttatgccccatcgcttgccagataatctgggcactaaggcagccaatcatacctgccagcaatccaccgagcatatccagcggccagtggacgccaagataaacgcggctccaggcaatgacgacggccagcaccattaaaagactgccggaccacaggcgatgccagcataaaaatgccagtgcaaaggtgaaaatcaccgtaccgtgatcgcttgggaaactgtcatccgccgcatgatgcaggaagttatagccgatattttcgacaaagggtcggtcgtgcggaaaaagatgtcccatcgtccaggacacaaacaggctgaccgccagcgcgatagcgatttttatcaccagttgccgttgtgctgtaagcccccacaaccaaagtaccacggccagcaacggcaccacggtaatcaaatctttagcaataaaaatcgccaagctgatcatccacggagcgctgtctggcgtcgcgttaataagagagaatagagagagattcaaattttccagcataacttcccgacgcaaagtgattaaaagggagccaatacaggcaagtcgttgagaataaagtgcaggttaaactgggtaaagcggcatcgtcttatttccctcaagcggcctgtttacggtgggtgattgtaacgggcataggttaaataaaacttaaagaaagcgtagctatactcgtaataatgtaagaatgtgcttaaccgtggtttcagctacaaaattcgctttctcgttagctgcgcttttattaaactctgcgcgattattattggcgaagaaattgcatgcaaaataaattagcttccggtgccaggcttggacgtcaggcgttacttttccctctctgtctggtgctttacgaatttagtacctatatcggcaacgatatgattcaacccggtatgttggccgtggtggaacaatatcaggcgggcattgattgggttcctactagcatgaccgcgtatctggcgggcgggatgtttttacaatggctgctggggccgctgagcgatcgtattggtcgccgtccggtgatgctggcgggagtggtgtggtttatcgtcacctgtctggcaatattgctggcgcaaaacattgaacaattcaccctgttgcgcttcttgcagggcataagcctctgtttcattggcgctgtgggatacgccgcaattcaggaatccttcgaagaggcggtttgtatcaagatcaccgcgctgatggcgaacgtggcgctgattgctccgctacttggtccgctggtgggcgcggcgtggatccatgtgctgccctgggaggggatgtttgttttgtttgccgcattggcagcgatctcctttttcggtctgcaacgagccatgcctgaaaccgccacgcgtataggcgagaaactgagtctgaaagaactcggtcgtgactataagctggtgctgaagaacggccgctttgtggcgggggcgctggcgctgggattcgttagtctgccgttgctggcgtggatcgcccagagcccgattatcatcattaccggcgagcagttgagcagctatgaatatggcttgctgcaagtgcctattttcggggcgttaattgcgggtaacttgctgttagcgcgtctgaccagccgccgcaccgtacgtagcctgattattatgggcggctggccgattatgattggtctattggtcgctgctgcggcaacggttatcagtagccacgcgtatttatggatgactgccgggttaagtatttatgctttcggtattggtctggcgaatgcgggactggtgcgattaaccctgtttgccagcgatatgagtaaaggtacggtttctgccgcgatgggaatgctgcaaatgctgatctttaccgttggtattgaaatcagcaaacatgcctggctgaacgggggcaacggactgtttaatctcttcaaccttgtcaacggaattttgtggctgagcctgatggttatctttttaaaagataaacagatgggaaattctcacgaagggtaaaaaaatgcctgactgctttgtgcgatcaggcattctcgaattaatggtgatggtcgtcaatctggtgttcgataaccatcccttcacctacgctggcaagatggcgaacataaggatgcgggcggtaagccggagctggcgcaggagccacatagacggtttgcggcacagtcgcgacgctgaccgcttgtggaacgctgacactatcaggaaccacaaccactttgtatccactcggcacatcgacggtgacactttgcgccatcgccacaccagtaaagcccattaaaagcgcgcccaacagtagacaatttttcataatcatttcgcctgaaataatgcagcgggttaatttccgcgaattatgcagccttcattcaggcattgtgttgccgggcgtgctgccggttttattggtcaaatggcgcttcgtgtttaagaactttatcgatcacatccagtacgccttcacggttattggagcctgcgcggtattttgccgctgcgacgaccgcgctaccggcattttccattgcaaaactaaagcctgcctgacgcagcatctcaatatcgttaccgccatcgccaaagaccaccacttcgctgtcgtctattccccataatttctgcagttggcgaaggccattggctttatgtacgccggggataatcagatcgatgctgccgttgccggtgtggacgctcaccataatatcgccgatggcctcatgtaatgctttttgtacttgtggaatcagttcatcggaaagattcaggccaaacttaaagaagatatcctctaagttgtcaaagttatcgacgtattccagacggtgataatacatttccgccaccgttttcatggcatcgtcatattttttgagtgtataggcactattttttccgcaggcaataatttccacttccgggcgcgtcagcaaatgttccacgacagtagcaaacgcatccttgcttagctcgccattaaaaacatctttgccttcgctcactacccagccgccgttttcagccacaaaggcaatttcattagcaatttcagggaagaaagagatcaactgataatattgattcccgctggcgactacaaagcgaattccttgtgctttcatttgctgatactgagccataaaccgctcacggttataggttttttgatcgcttaagaaagtaccatccatgtctaccgcaattaatttaatgctcatcaactattctccatcgccgtctgcgttttggtatcgggtttggcgacggctttcgcgacaatagccgcgagaataaccagcgccagtacaaccagcattgcactacgtaatccataatgttcgccgagatagcccagcagcggcggcccgacgaggaaagccagataaccggtcgttgctaccacactgacgcgggttggtgcatcggggccggtatcgctggcggcagaaatggtcagcgggaagcccaggctggcacccagtccccagagtacaacagacaccccagcgacccaggcgctatcgacaaaaataatcagcccaatacccaacgcccccattagtgcactggcccgaaccacggcaacgcgactgtaacggtcgatgaaccaaccgccggtgaagcgtccaacggtcatccccagggtaaaaccggcataaatcaggctgccggaagtagggctaaaaccgtgaccgtcaaccattaataagggtaaccagtcgttggcagaaccttcggcaaaggccatcgccagcaccacaacacctatcagcagcaactggatatcgcgataaaaaggtacgcctttttcgccatgctgggtgccatcggcagcatttttgcccgtaccgtcagggattgcctgaatggcgatataaataggtgcgatacctaccagcgccgccaataaaatgtgcaccgttgccggaacgccaaaggccgtcagtgccatcccgacacctgcgcctgccagcgtgcccaggctataaaaaccgtgcatcatcggcaaaaccgtcttattcatttctcgctcaacggcagcaccttcaacgtttatcgccacttccgcagaaccaaaacttgccccaaagacgccgagaccaacggcaaagagcagggggcttgtcagccagagtgccagacttaatatcatcatcccgatcaatgcgcaggacatcgtgaccaggatgacattacgtgtcccaaagcgtttcactaaccacgcgctgcagagaataccgctcatgctaccgatgctcagaccaaagagaacaccgcccatttcagcgatgctgacagagagaatatcgcggatagcaggcgtacgggttgcccaggacgccattaacaggcctggcaaaaagaagaacataaacagcgcccaggttcggcgtttcaatgcattacgactagaatttacggtcatagatcacgtcaaaataagaagagggaagacaacattagcaaggttgtgtacatttgtacacaattgcagagagaggaaatgacatgcgtcgcgctaacgatccgcaacggcgagaaaaaattatccaggccacgctggaggcggtgaaactttacggaatacatgctgttacgcaccgcaaaattgctacccttgccggggtaccgttgggaagcatgacctactattttagtggaattgatgagttgttactggaggcgttcagcagttttactgagatcatgtcccggcaatatcaggcattttttagcgatgttagtgatgctccgggcgcatgccaggctatcaccgatatgatctacagcagtcaggttgcaacgccggataacatggagctgatgtaccagctctacgcgctggctagccgaaaaccgctattaaaaacggtaatgcaaaactggatgcagcgcagtcagcaaacgctcgaacaatggtttgaacccggaaccgcccgcgcgcttgatgcgtttattgaggggatgacgctgcattttgtcaccgaccgtaagccgctaagccgcgaggagattttgaggatggttgagagggttgcagggtaatagataagttttagataacaaaaaacccatcaaccttgaaccgaaatggcggggttgatgggctccacaaaatggggacatcaaagaaaagcagtggcactaattaagactgatgccctgcggaaaagttctgcggttgtgcaaaaaaatttcattttcagggcaacttcagttttatcctaatcctggccataccatgacgatgattgtccctgccagcgtcagcaggacgttggcgattgcataggtgcccgcatagcccagcgccgggatgttactgcgagctgtatcactgatgatctccattgccggcgcgcaggtacgtgcgcccatcattgcgccgaacaacagcgcgcggttcattcgcaatacataagcaccgaacaagaaacagataaccacgggcaccagactgacaatcaatccggcaatcaacatctgaccgccaatcgcgcccaggccgttattaataccgctaccggcgctcagaccaacgcctgccataaacaccatcaagccgaactctttcaccatgcttaatgcaccctgcggaatgtaaccgaaggtcgggtggttagcacgcataaagcccagcataattccggcgaataacaacccggcagcgttccccatgccgaaactgaatgtgctgaactggaaggtgatcatcccgatcatcagcccaataacaaagaaggcgcagaatgccagcaggtcagtgacctggctgtgaatgctgataaagccgatgcgatcggcgatggtttttacgcggcgggcatcgccgctgacttgtaaaacgtcacctttgttaagcacgacgttgtcatctatcggcatctcaatctggctacgaatgacgcggttaaggaagcaaccgtgatcggtcaacttcagttgtgcgagacgtttacctacagcgttatggtttttaacgaccacttcttcagtgacgatacgcatgtcgagaaggtcacgatcgaaaacttctttaccgttacggaagctgggatcgagtcgggcatgggcgtcgggatagcctaccaacgctatttcatcgcccatttgtagcacggcatcaccgtctggatttgccagaatcccgttacgtcgaatacgttcaatgtagcagccggtttgtcgataaatacccagttcacgcagatttttgccgtcggtccaggccaccagttccgggccgacgcgataggcgcggatcaccggtaaataaaccttacggttggcatcagtgtccaggccacgttcgcgggcgatttgctgggcgctggtctgtaagtcctgatgctgcaatttcggcaagtaacgcgcaccaacaatcaaactcaccagaccgattaaataggttaaggcatacccgaggctcagattatccagtgccagactgagctgcctgctttccatgccggaatgacgcagtgtatcgccagcaccgaccagaaccggtgtgctcgtcatagagcctgctaacataccggccgtcaggccaatatcccagccaaacagcttacctaaccctaaggcgatcaccagcgcactgccaaccatcaccagtgctaacattaggtaatttttcccatcgcgaaaaaaaatggaaaaaaagttcggtccggcttcgaccccgacgcagaaaataaacagcataaagccaagattaagcgcatcggtgttaatgctgaaatgttgttggcctaataacaggcttacgactaaaacgccaatggaattacccagttggatgctaccaagtcgtaactttccgagacatagcccaagcgcgaggaccacaaataataacagaatgtaattcccatttaacaattcggcgacgtttatattcacggaggctaacttcttgtttactagtaagctgttgaaagaaatggtaatttacgataatgttttttaccagaattcagggcgcagattcattcagcgcacctaaacgatagtaaagtaacaatatattttactagtgtaatcacattaggtatcaacggctatatgaattgcgttggcctatattagcatggaatgcgaagcggctttatcttactgaacgccacactggcgaaaaatgtgttcgatagacgcagtgtcaggaggaacgagtgaaacataaacaacgttgggcgggggcaatctgctgttttgtcctcttcattgtggtgtgcctttttctggcgacgcacatgaaaggcgcttttcgggctgccgggcatcctgaaatcggcttgctatttttcattcttcctggagcagtcgccagcttctttagtcagcgtagagaagtcctgaaacctctgtttggcgcaatgctggcggcaccctgtagcatgctcattatgcggctgttttttagtccgacgcgcagtttctggcaagagctggcatggttactaagcgcggtgttctggtgtgcgctgggggcactgtgtttcttatttatcagtagtttgtttaaaccacagcacagaaaaaatcagtaaagccctcaacgcgagggcttgtcagacgatcaggcgtccagattttctttcacccatgcagcaaaatcggtatagccgccgatatgttgctgatcgacaaaaatctgcggcacggtttctacgggtttacctgccttttgttgtagatcttctttagtgatcccttccgcacgaatatctacatactgatactgaaaatcatcgcgttcattgctcaatttctcagccagatcttttgcacgcacacagtaagggcaaccgctacgaccaaaaataacggtttgcattatttctctcctcatagatttatgcctgtaatgatcacgctaaaatgtattcgctgaaagtaggtttaacctgttgcattaattgctaaaagctataactgttaaacacaatacagtgaaaagttttagactgaaggctcactttgcagagggaagcgtatgcgcgcgatcggtaaattgcctaaaggcgtgttgatactggaatttatcggaatgatgctactggcggtggcgctgctgagcgtaagcgactccctgagcctgcctgagccattttctcggccagaagtgcagattctgatgatttttctcggtgttttgctcatgcttcccgctgcggtggtggttattcttcaggtggcaaaacgtcttgccccacagctgatgaaccgtccaccgcaatatagtcgtagtgaaagagaaaaagataatgacgccaaccattgaacttatttgtggccatcgctccattcgccatttcactgatgaacccatttccgaagcgcagcgtgaggcgattattaacagcgcccgtgcgacgtccagttccagttttttgcagtgcagtagcattattcgcattaccgacaaagcgttacgtgaagaactggtgacgctgaccggcgggcaaaaacacgtagcgcaagcggcggagttctgggtgttctgtgccgactttaaccgccatttacagatctgtccggatgctcagctcggcctggcggaacaactgttgctcggtgtcgttgatacggcaatgatggcgcagaatgcattaatcgcagcggaaagcctgggattgggcggggtatatatcggcggcctgcgcaataatattgaagcggtgacgaaactgcttaaattaccgcagcatgttctgccgctgtttgggctgtgccttggctggcctgcggataatccggatcttaagccgcgtttaccggcctccattttggtgcatgaaaacagctatcaaccgctggataaaggcgcactggcgcagtatgacgagcaactggcggaatattacctcacccgtggcagcaataatcgccgggatacctggagcgatcatatccgccgaacaatcattaaagaaagccgcccatttattctggattatttgcacaaacagggttgggcgacgcgctaaaaccgccacgtcgatgtatgatacgcgggcttttgaccaggtctgacagagaggtgcagggtgaaaattgccatattgtcccgggatggaacgctctatagctgtaagcggctgcgtgaagccgctatacagcgcggtcacctggttgaaattcttgatccgctttcttgctacatgaacataaatcctgcggcgtcttctattcactacaaaggccgcaagttaccccattttgacgcagtgatcccgcgtattggcaccgccattaccttttatgggacggcggcactgcgccagttcgagatgctggggagctatccgctcaatgagagcgtcgccattgcccgggcgcgtgacaaattgcgttccatgcaactgctggcgcgtcagggcatcgacctgcctgtcacgggcattgcgcatagcccggatgataccagcgatttaatcgacatggtcggtggtgcgccgctggtggtcaagttggttgaaggcacgcagggaattggcgtcgtgctggcggagacgcgtcaggcggcggaaagcgtgattgacgctttccgcggtctgaacgcgcatattctggtgcaggaatatatcaaagaggcgcaagggtgcgatatccgctgtctggttgttggcgatgaagtggtcgctgcgattgaacggcgggcgaaagagggcgattttcgttccaatttgcatcgtggcggcgcggcaagcgtcgccagtatcacaccacaggagcgtgaaatcgcgataaaagccgcgcgaacgatggcgctggacgttgctggtgtggatattctgcgtgctaatcgcgggccgttggtgatggaggtgaatgcgagcccggggctggaaggaatagaaaaaaccaccggtatcgacatcgcgggtaaaatgatccgctggatcgaacgccacgctacgacagaatattgcctgaaaacgggtggttaatcgcaatcacattactgatcatggttttgcctgcgctttttgcgtaagctgtgccggtctttttatcgaaagaggttgtacaaaattatgacaagcctggtcgttcctggtctggatacgctgcgtcaatggctcgatgacctggggatgagtttttttgaatgtgataactgtcaggctctgcatctgccccatatgcagaatttcgacggtgtctttgatgccaaaatcgatctgatcgataacacgatcctgttttctgccatggcggaagtccgacctagtgccgtattgccgctggcggcggatttatctgccatcaatgccagtagcctgaccgtgaaagcatttcttgatatgcaggatgataatctgccaaagctggtggtttgccagtctttatccgttatgcagggcgtaacctatgagcagtttgcatggttcgtgcgtcagagcgaagagcagattagcatggtcattcttgaagctaatgcccatcaactgctgttaccgactgatgatgaagggcaaaacaacgttaccgaaaactatttcctccactgataactcctttcgagcacgcagtcgctggtgcagtggctgcgcgctgcaaaattatctgctgtttttaaccttttcttaaagattatttcacttctcttgtgtcgatttggctttatcacatagagcaaatatgcataaaaatttgttaaataccgttttttaatccgagctatagtctcaaaccctggctaaagttattcttgcgatgcttttatatagcgagcagtgctggccgggagaaagttctcttttcttacaccgcgccgataaaaaatatgcacgtttattgcatatctttcagtgtgacaacttttgttcgtttgttaacgaactttcagaaggaaagagatatgaccgccttaaataaaaaatggctaagcggtctggttgcgggtgctctgatggccgtctctgtcggcacgctcgcggctgaacaaaaaacactccacatttataactggtctgattatatcgccccggacacggtggccaattttgaaaaagaaaccggtattaaagtcgtctacgatgttttcgactctaacgaagtactggaaggcaaattaatggccgggagtaccggctttgatctggtggttccatctgccagctttctggagcgccagttgactgcgggagttttccagccgctggacaaaagcaaattgccggagtggaagaatctcgacccggaactgctgaagctggtcgccaaacacgatcccgacaataaatttgctatgccctatatgtgggcgacgaccgggattggctataacgttgataaagttaaagcggtgctgggcgaaaacgcgcccgtcgatagctgggacttgatcctcaaacctgaaaatctggaaaaactgaaaagctgcggtgtctctttcctggatgcgccagaagaagtttttgctaccgtgttgaattatctcggcaaagatcccaacagcactaaagcggatgattacaccggaccggcaacagatctgctgttaaagctgcgcccgaacattcgttatttccatagttctcaatacattaacgacctggcaaacggcgatatttgcgtcgctatcggctgggcaggtgatgtctggcaggcgagtaaccgcgcgaaggaagcgaagaatggcgtgaatgtcagcttcagcattccaaaagaaggggcgatggcgttctttgatgtattcgccatgcctgcggatgccaaaaacaaagacgaagcctatcagttcctgaattacctgctgcgcccggatgtagtagcgcatatttccgaccatgtgttctatgccaacgccaataaagcagccacgccgctggtgagtgcggaagtccgtgagaacccaggtatttatccgcctgcggatgttcgtgcgaagctgttcactctgaaagtgcaggatccgaaaatcgaccgtgtgcgcacccgcgcgtggaccaaagtgaagagcggaaaataatccgcagtcgtagatgccggaggggcgcaccacacccgccggcaattcgcaccattatggtgcgcttgcacacattcaatgccggagagcagccgtgaatgacgctatccctcgcccgcaggcgaaaacccgtaaggcgctgacgccgctattagaaatccgcaacctgaccaaatcctacgatggtcaacatgcggtggatgatgtcagcctgaccatctacaaaggtgaaatcttcgcgctgctgggcgcatccggctgtggcaagtccacgctgctgcgtatgctggcaggtttcgaacaaccttctgccggacagataatgcttgatggcgtcgatttgagtcaggttccgccttacctgcgccccatcaatatgatgtttcagtcttacgcgctgtttccgcatatgaccgtggaacagaacatcgcttttggcctgaaacaggacaaactaccgaaagcggaaattgccagccgggtcaatgagatgctcggcctggtgcatatgcaggagttcgccaaacgcaaaccgcatcagctttccggtggtcagcgacaacgtgtggccctggcccgaagccttgcgaagcgcccgaaactattactgctcgatgagccgatgggcgcgctggataaaaagctgcgtgacaggatgcagcttgaagtggtggatattctggagcgcgtcggtgtgacttgtgtgatggtcacccacgatcaggaagaggcgatgaccatggcggggcgcatcgccattatgaatcgtgggaaatttgtccagattggcgaaccggaagagatctacgagcatccgactacccgctatagcgccgaatttattggcagcgtaaacgtctttgaaggcgtactcaaagagcgtcaggaagatggcctggtgcttgatagcccggggctggtgcatccactgaaagtcgacgcggatgccagcgtggtcgataacgtgccggtacatgtggcgctgcgcccggaaaaaatcatgctttgcgaagagccgcccgccaatggttgtaacttcgcggtgggggaggtgatacacattgcctatctcggcgatcttagcgtgtatcacgttcgtctgaaaagtgggcagatgattagcgcccagctacaaaacgcccatcgtcatcgtaaagggttaccgacctggggcgacgaagtgcgtttgtgctgggaagtggacagctgtgtggtgctgacggtttaaggagcaaagatgagtacacttgaacctgctgcccagagcaaaccgccgggcggatttaagctgtggttgagccagctgcaaatgaagcatgggcgcaaactggtcattgcgttgccatatatctggttgatcttgctgtttctgctgccatttctgattgtctttaaaataagcctggcggagatggcgcgcgctattccaccttataccgaactgatggagtgggctgacgggcaactgtccatcactcttaatctcggtaattttctgcaactgaccgacgatccgctctatttcgatgcttatctccagagcctacaggtggctgcgattagcacattttgctgtttactgatcggctatccgctggcgtgggcggtggcgcacagtaagcctagcacccgtaatattttattactactggtgatcctgccgagctggaccagctttctgatccgcgtttatgcctggatgggaatattaaaaaacaacggtgtgctgaataattttctgctgtggctgggggttatcgatcaaccgctgaccattctgcataccaatctggccgtttatatcggcattgtttacgcttacgtgccgtttatggtactgccgatttataccgcgttgattcgtattgattatagcctggtggaagcagcgctggatctcggtgcacgaccgctgaaaacgttctttactgtgatcgtgccgctgactaaaggtgggattattgccggaagcatgctggtgtttatcccggctgtgggcgagtttgtgatcccggaactgctcggtggcccggacagcatcatgatcgggcgcgtgctatggcaagagtttttcaataaccgcgactggccggtggccagcgcggtagcgatcatcatgttgctgctgctaattgtgccgataatgtggttccacaaacaccagcaaaaaagcgtgggagaacacggatgaataatttaccggtagttcgtagcccctggcggattgtgattttgctgctgggctttacctttctctacgcgccaatgctgatgctggttatctatagctttaacagcagcaagctggtgacggtgtgggccggctggagtacgcgctggtatggtgagttattgcgcgatgacgcgatgatgagtgcggttggtttaagtctgacaattgcggcctgtgcggcgacggcggcggcgatcctcggaactattgcggcggtggtgctggtgcgctttggcaggtttcgcggaagtaatggctttgcctttatgatcaccgcgccgctggtaatgccagatgtcatcacgggcttgagcctgttgttattattcgtcgcgcttgctcatgccattggctggcctgcggaccgcggtatgctcaccatctggctggcgcatgtcactttttgtacggcttatgtggcggtcgttatttctagtagattgcgggaactggatcgcagcatagaagaagcagcgatggatctcggtgcgacgccgctgaaagtgtttttcgtcattacgctaccgatgatcatgcccgcgatcatttctggctggttactggcttttactttgagccttgatgatctggtgatcgccagctttgtttccgggccgggagccaccacgttaccgatgctggtcttttccagcgtgcggatgggggtgaatccggaaatcaacgccctggcaacattgatcctcggcgcggtcggaattgtcggatttatcgcctggtatctgatggctcgcgcagaaaaacagcggatacgcgacatccagcgtgcaagacgtggctgaagacactaaaatttgccaacctggctacataatgccgcgcatgtcgcggcattgttttcatggaagacgaaacgttgggattttttaagaaaacatctagttctcatgctcgcctgaatgtgcctgcgctggtgcaggtggcggcgctcgccattattatgatccgtggcctcgacgtgctgatgattttcaatacgctgggcgtgcgcggtattggcgagttcattcatcgcagcgtacaaacctggagtttaacgctggtctttttaagcagtctggtgctggttttcattgagatctggtgtgcgtttagtctggtgaaagggcgtcgctgggcgcgctggctatatctgctgacacaaatcaccgccgcaagttacttgtgggcggctagcctggggtacggttatccggagctgttcagcattcccggtgaaagtaaacgtgaaatcttccatagcctgatgctgcagaagctgccggatatgctcatcctgatgctgctgttcgttcccagcaccagtcggcggttcttccagttgcaataatgtgtataatcgtcgcccctgatgatgtgaaggtcaatgtatgcagtgcgcactttacgacgcgggtcgctgtcgttcctgtcagtggataatgcagccgattccagagcaactctccgctaaaaccgccgatcttaaaaatctgctcgccgactttccggttgaggaatggtgcgcgccggtgagtggcccggaacaagggtttcgtaataaagccaaaatggtggtgagtggtagcgttgaaaaaccactgctcggtatgctgcatcgcgatggcacaccagaagacctttgtgactgcccgctttatcctgccagttttgcgcccgtttttgcggcgctaaaaccgtttatcgcccgagcggggttaacgccctacaacgtggcgcgtaagcgtggcgaactgaaatacattctgctgactgaaagccagagtgatggaggcatgatgctgcgctttgtactgcgttctgataccaagctggcgcaactgcgtaaggcgctgccgtggttacacgaacaactaccgcagctgaaagttattaccgtcaatattcagccggtacatatggcgattatggaaggggagacggagatctacctgaccgaacaacaggcactggcggagcgttttaatgacgtaccgctgtggatccgtccgcaaagtttcttccagactaatccggcggtcgccagccagttgtacgccaccgcgcgcgactgggtacgacagctgccggttaaacatatgtgggatctgttctgcggtgtggggggctttggtttacactgcgcgacgcctgacatgcagttaaccgggatcgaaattgcaagtgaggccattgcctgtgcaaagcagagtgccgctgaactgggcttaacgcgtttgcaatttcaggcgctggactccactcagtttgccaccgctcagggggatgtgccggagctggtgctggttaacccgccgcgccgcggcattggtaaaccgctgtgtgattatctcagtacgatggcaccgcgttttatcatctactccagctgtaacgcccaaactatggcgaaagatatccgcgaactgcctgggtttcgtattgaacgggtgcagcttttcgatatgttcccgcataccgcgcactatgaagtgctgacgctgctggtgaagcaataaaaaagccgcatgtgcggcttcagattgctgacaaagtgcgcgttgtttatgccggatgcggcgtaaacgccttatccggcctacaaaagcgtgcaaattcaatacattgcatgggccatgtaggcctgataagcgtagcgcatcaggcaattttacctttgtcatcagtctcaagccgcggttgcggctttctgaatcttactgtgggaaccactggtcactgattttttgataagtaccgtcagctttaattgctgccagcgcgttattcagtttttccagcagggctttgttatccggacgtacagcgatgcccaggccggtgccaaaatattgcggatcggtcactttctcagtagcaacaccaagttgtggattggttttcagccattcgtttaccaccgctgtgtcaccaaataccccatcaatacgaccatttttcagatcgataaaggcattctgataactgtcataagagacagttttcacttccgggtgctgatcctgaatatatttctggtgcgtagtaccgttttccatcccaatacgtttgcctttcagatcggcaaacgttttgtaggtatcttttttggcaatcacgacggcactgttttcatagtagggcgtggtaaagcttacctgtttgctacgctccggggtgatatccataccggagattacggcgtcatattttctgaatttcagggacgggatcaggctgtcgaacgcgtgattagtaaaagtacattctgcctgcatttgtttgcacaaggcttttgccagatcgatatcaaagccgacaatctcattattagcacctatagattcaaagggtggataggtggcactaacgccaaaattgattttctctgcggcagaagcaccgaaagtaaaggaagcaagtaaagcggcaagaactaactttttcatgatggaactcccgtctgtcaatcttatgatttttggccgtgtctgcggcatgggataacaatgccatcaagtgaatttatatgcaataaacatgattaaataatttaaatgaaataaaaaagacggacaacttagtgggttgtccgtcttcattataagaatttatgcactatgtaggccggataaggcgtccccgccgcatccggcacaggcaccgtgctgatgtctgatgcgacgctggcgcgtcttatcagacctacaaaaccccccggcgaatgtacgcagccacattaatttcgccgttcgaatgccagcgctttgcgctcgatcagacgcatcatcagcgtcagcaggccgttaacgaccaggtaaataatccctgccgcaccgaacaccattacatcgtaggtgcgtccgtacaacaactggctgtatcccatcacttccatcagcgtaatggtgtatgccagagaggtacttttgaataccagcaccacttcgttggaataagaagagaggctgcgtttaaaggcatacggcagcaggatcgccagcgtatcttttttgctcattcccagggcgctacaggactgccactgaccttccgggatcgcacgaattgcaccgtaaaacagctgcgtggtatacgccgcactattcaggctcaacgcaatcagcgcacataaccacggttcactcaacaaatgccacagtgccggatactcctgcaaagtcggaaactggcccggcccgtaataaatcaggaagatctgcaccagcagcggcgtaccggtaaacagcgtgatataaccccgcaccagccacaccagcaccggcgttttcagcgtcaggatgatggtaaaaatcaatgccagaatcagtgccacaatcaggctggcaacggttagcgtcaggctggtgtgtagccctttcatcagttcgggtaaatactcaaacattagctgggcctccgctcaaaacgtgtcgcgcgcaggtcaatgcgtttgagaatgtactgactgagcagggtgatcaccaggtaaatcgccgccgccacaatgtaccaggtaaatggttcctgggtacgagtagcgatgctttttgtttgcagcattaaatcattcacactaatcaaactgaccagcgcggtatctttcagcagcaccagccactggttaccgaggccaggcagcgcatgacgccacatctgcggcatcaccagacggaaaaagatagcgcttttgctcagccccagcgcctgaccagactcccactgacccaccggcaccgctttcaacgcgccccgaagcgtttggctggcataggcggcatacagcagactcagagcgatgacaccacaaaggaacgggctaacgtcgaagttctcaatgtccatctgcactgggatctgcacgaacccaagattgatagtgaagccatcgctaagcgtcagcagcagctggctggagccaaaatagataaacagcaccaccagaatttctggcaggccacgcagaatggttaccagcgcactacctgcccacgcgacaggacgccattttgcgctctcccataccgcaaagaacatcgccagcgccagcccgacaatcaatgcacaaacggcaaggccgacggtcatcccggcggcgcttgctaaaggaaaaaattcattcatcaggaattacttctggaaccatttgttgtagatggtttcgtaagtgccatctttcttcactttttccagcgcagtgttgagtttctgctgcagctcagtgttgccctgacgtaccgcgatgccgaggccagtgccgaagtaatctttatcggtcactttgtcgcccaccgccgccagtttcgggttatctttcagccactcagtgaccactgcggtgtcaccgaagacgccgtcgatacgcccgttttgcagatccagttttgcgttctggtagctgtcatacggaacggtagtgatttccgggtgcttatccataatgaatttctggtgtgtcgtcccgttctgtacgccgacttttttgcctttcagctgatcaacactggtgtatttgccttgctgacccacaaacagggcagagttgtcatagtacggggtggtaaacagcacctgcttttcacgctccggagtgatatccatgcccgccatcacggcttctacgcgacggaatttcaggcttgggatcaggctgtcaaacgcctggttagagaaagtgcaggttgcatcaatctctttacacagcgcttgtgccaggtcgacgtcaaaaccaacgatctggttgtttgcatcaatgctttcaaacggaggataggaggcttcggtagcaaaacgaatggtttcggcagctgtggcggaaagactaaaacctgcaattaacgcggcaatcagaacttttttcattgttgttatcccgaatcttagtgagagagatagtttttaaatgcttcggtttgcggctcggtaaagcagctcgcgtcgccttgttctacgatatgaccattttccatatacaccactcggctggcggttttacgcgccacttcaacttcgtgggtgacgatcacctgggtaatattcgtttctgccagctcacgaatgatgctgacgatttgtgccgtaatttccgggtccagtgcggcggtcggttcatcgaacagcagtacctgcggttccatcatcaacgcacgggcaatagcaacacgctgctgctgaccaccagaaagatgcagcgggtaacgatcgctataaggtttgagacgcagacgttccagcagtttttctgcacgggccagcgcctgatctttactcaaccccagtacacggcagggcgcttcaatcaggttttgctgcacggtcagatgcggccacaggttgtattgctgaaacaccatgccaacgttacgacgcaaatcgcgaatcgctttgtcagagggtgttttggtgaaatcgaaatggttgcctgcaatgttgagcgtaccggagcgcggcatctcaagcagattgagtacacgcagcaggctgcttttacccgcgccgctggggccaagtaacaccagcgtttcgccctgtgggcaatccagcgtgatatcgaacagcgcctgatgcgcgccgtagaagcaattaatgccgtttaattgaatactcattgacactcgtatactggcagtctgatagctattgaggtcgaagatagtacctttgacagaataattatgcaatatttctgctttaaaagttaaaagcaaagcgcattattcaataaacatagcacaaaataacgggggcggtggtcggcgagcataaatgtcggcattcctcacgaaatgccggacaatttacggggtttattggttgatcaaggcgttagcgattctcgatggactgacggagcgtacccgccgtggcatgaacgctaccgcctaagtaacgcacatcgtcgatgacccaacactggccttcctgaatcattaacacttcatcctgccaaccctggtcaccctgtttgagatccacgcgcaatggaatgttacgggcatcacgattagggatagtgcttgcactggcaacgtgggcgctatctggcaaggtggttcgactggagaatggatcgttggtcagtagttcccgatggttattatcccgggaggcatcgctaagcagtgtcgccagtttgtcgctcagataagggcgcaaggcggtgatgtcgttgctgcggtgcaaaatgcggtagtcataaaattgctgggccacgttatccgggcctccttcaacgcaaggaccactgcgtgtgccgttatctttataagctggagtgactgtggtgcaggcactgaggagcagtgcgcaggggataagcattgtcaatttgctgtagcgcataatgatttccttataagcgatcgctctgaaagcgttctacgataataatgatatcctttcaataatagcgtatcagtctgataatgcttttgagatcgaaggcttagcaaacaaggagatcgatcatgcaattttctacaaccccaactctggaaggccagaccatcgttgaatattgcggtgtggtgaccggcgaagcgattttaggtgccaatattttccgtgatttctttgccggtatccgcgatatcgttggcggacgttccggtgcgtatgaaaaagaactgcgtaaagcacgggagatcgcctttgaggaattaggctcccaggcgcgggcgctgggggccgatgccgtcgtcggtattgatatcgactacgaaacggtcgggcaaaacggcagtatgctgatggttagcgtcagcggtacggcggtgaaaacgcgtcgatgagaagattcttctggctggtcgctgccgctctgttattggcagggtgtgcaggcgaaaaaggcattgtcgagaaagagggatatcagcttgatacccgacgccaggcgcaggcggcgtatccgcgcattaaagtgctggtgatccactacaccgcagatgattttgatagcagcctggcgacactgaccgataagcaggtcagcagccattatctggtccctgcggtaccaccgcgatacaacggtaaaccgcgcatctggcaactggtgccggaacaagaactggcctggcatgcggggattagcgcctggcgcggggcaacgcgccttaacgacacctctattggcattgagctggaaaaccgtggctggcaaaaaagcgccggagtgaaatattttgccccgtttgaaccggcacagattcaggcgcttattccactggcgaaagatattattgcccgttatcacatcaagccggaaaacgtagtggcacatgcggatatcgcaccgcagcgcaaagacgatccggggccattatttccctggcagcaactggcgcagcaggggattggtgcctggccggatgcgcagcgggttaacttttaccttgccgggcgcgcgccgcacacaccggtagataccgcgagtttgctggagcttttggcgcgctacggttatgacgttaaacctgatatgacaccgcgcgagcagcggcgcgtgattatggcattccagatgcatttccgcccgacgttatataacggcgaagcggatgcagaaactcaggcgattgccgaagcattgctggagaaatacgggcaggattaacgcggcagttttccgtggtcgcgtagccaggcggcagttttctcgataccttcatccagggtgatgaccggctgataacctaactcttcctgcgcacgcgtaatatccagcgtaaagtcaaaattcaacttggagacgccgtagtgggtcagcggcggctcttttgcactcttgcggcctaaacgctccatgctgcgggcgatcatatccagcatcgggtaggggacggaacgaatacgacagtcaatattcaactcgtcgatcagcttctgcacgatgctgcgcagtgtgcgatgctcgccgttggtgatgttgtacacacgcccggaaggtagcttatcgcaggcttcctggcttgccagccacattgcgtgcacggcattttcatagtaggtcatatcgaccagcgcactgccgccatgcggtaacagaatactgccgtagtggtgcatcatatgcgccagacggggaataaagactttatcgtgcggtccgaacagactttgtgggcgcagaatagtaaagcgcgtttgtggattcgcctggctaagcatattgatcacttcttcgctggctgctttgctgcgggcaaactcgttggcgaagcggtgagggcgaaaatcttctttaatatcgcgatggtggtgataatcgaagtacagggagggggaagagatatgaataaagttacgcacaccccaggcgacagcccattcacccaggcggcgagtggcgcgaacgttagccagatcgaaagcctgttgtgtcccccagggactggtaaagctggagcagtgccacagcgtatcaatgcccgcgagcatcactttagcttgactactaaccagctcggtcagatccgccggaacaaactctgcgcccattttttccagcaatttgcccattgcctcgttgcgaccggtcgctcgcacgctgatgcctttctggcataaaaactctaccgcgtttcgacctaagccgctggtggcgccggtaaccagtaccttcatatcaatccactgttgttgagaaaataacgtgcgcattcttccgtgatttcccccatgatgcaatgggaaacatgaaagaataacgcaggttttgtcgattaatctgtgctttgttctgccagtctggcgatttgttttgccattccgcgaaaaataaacagatgcgcggggatcatcaataaccagtaaaacagccccggcataccgtgcggatgccagaaagcgcggacatcgatagtacgatagtcgcctttatcttccaggctaaaacacagtcgtcccagccccggcgctttcatgccaaataacaacgtaagttgtttttccggttcaacgacaatcactttccagctatccaccgcatcgccagtctgtaaatattcgcgctccgggcggcctttcgccagcttatgaccgatcgcgcggtccatcaacgcccgtgtctgccacaaaatattgccaaagaaataacgctctttaccgccgatttggttcactacctgccataaagcagcaaggctggcggacgttttaacggtaaaccccgcctgtttggcaaaataaccgtactccggtcgccagcgggcaaaggcctgagcgtcgtagccccagtcgctggagttgaccagtttttcctcctctttcaacgtgctacgtaccgcgtcatcgaaagcgatcagccgttgtgggatgagtgcacgtagcgcggtatcatccgccagcagatcgtgtttcagcccctgaatcaacgccctggcggtggtgggcggtacggaagtaatcacattgagaaaccacacgctaatccagcgggtggggagggggatggggatcaaccagcggcgcttaccgctcaccgccataaaatgttcaaactgttgctgataactgagcacctctggtccggcggcttcgaagatgcggtgttcgctggccggatgatctaacaacgcaaccagatagtgcagcaagttttccagcgcaatgggcgtggtgcgactacgaacccagcgcggaggcgttaagactggcaggttgtagaccatatcgcgcatgacttcgaacgccgcggaacctgcgccaacgataattccggcccgcagttcggtcacgggtacattcgcttcacgcagaatgtccgccgtagcctgacgagcacgcagatgatcgctctgctcatgtggcggggcctgcaagctactaagaaagattaattgcttaactggtacttcacgtagcgcatcgcggacgttgagagccacctggcgctcctgagcgataaaatcgccgccttcgcccatgctgtgcaccagaaaatagaccgtatcgatatcctgcaacagggccggtaggttatccggccagctgagatcgactttatggcaactgacgtttgccagttgcagctttgcaagcctgtcgacatgacgtgccgccgccaggatctgatgcccttgctggctgagtgtgcgcaccagatgctgaccaatgtagccactggcaccgagaactaaaatgcgttgcggcacgtctctctccttaacgcgccaggaatgcacgccagtgggcggcgacttccgccagttgttcgcggctgacgtcaagatgcgtcaccaggcggacaatcgggctggcgttaatcagcacgtttctcgctttcatgtattcgcctaacgcggcagcattttcttccccgacgcgaacaaacagcatattggtgtcctgacgcatcacatccgcgcctgcttcacgcagctgctccgccatccaggcagcgttgtcgtggtcttcctgcaagcgcgcaacgttatttttcagggcatatatcccggcggcagccagaatgccggactggcgcatcccgccacctgtcattttccgccagcgaatggcacgtttaatgtaatcacgattaccgacgagtaaactaccgactggcgtcccaagacctttgctcaggcaaatggtgaagctatcacaatattgcgtgatctctttcagttcgcagccgtaagccaccacggcattaaagatgcgcgcaccgtcaacatgcagcgccagattgcgctcgcgggtaaattcccatgcttctttcaggtattcccgcggcaacactttgccgttgtgggtgttttccagactgagtaatttggtgcgggcgaaatggatatcgtcgggtttgattttcatcgccactttatccagcggtagcgtgccgtcggcagccgcgtctatgggttgcggttgaatactgcccagcaccgccgcgccaccggcttcaaacagatagttatgcgcggcctgaccgacaatatactcttcgccgcgttcgcagtgactgagcagagcgaccaggttggcctgagtgccggtaggcagaaaaatggcggcttctttaccggaaagctctgctgcgtagtcctgcagagcattaacggtagggtcgtctccgtaaacgtcgtccccaaccggggcggccatcatcgcttcgagcatggcgcggcttggtcgggtaacggtatcactgcgtaaatcaatcatggcatgtccttattatgacgggaaatgccaccctttttaccttagccagtttgttttcgccagttcgatcacttcatcaccgcgtccgctgatgattgcgcgcagcatatacaggctgaaacctttggcctgttcgagtttgatctgcggtggaatggctaactcttctttggcgaccaccacatccaccaacaccggaccgtcgatggagaaggcgcgttgcagggcttcatcaacttcagacgctttttctacacggatacccgtaatgccgcacgcttcggcaatgcgggcaaagtttgtgtcgtgtagttcggtgccgtcagtcaaatagccaccagctttcatctccatcgccacaaagcccagcacgctgttgttaaagacgacaattttcactggcagtttcatctgcactacactgaggaaatcgcccatcaacatgctaaaaccgccatcgccgcacatggcgaccacctgacgttctggctctgtcgcctgcgcacccagcgcctgcggcatggcgttagccatgctaccgtggttaaagctacctaacaggcgacgcttgccgttcatttttagataacgtgccgcccacaccgttggcgtaccaacgtcacaggtgaaaatagcgtcatcggcggcaaaatgactaatttgctgcgccagatattgcgggtgaatggctttctcgctcggtttagctaaatcgtccagccctttgcgggcgtcgcggtaatcttccagcgctttatccagaaacttgcgatcggctttttcttccaccaatggaagcaatgcacgcagagtgctcttgatatcgccgaccagtgccatatccaccttgctgtgagcgccgatgctggctgggttgatatcaatctgaatgattttggcatcggtcgggtagaaggcgcggtagggaaattgcgtgccgagtagcactaacgtgtcggcgttcatcatggtatggaaaccactgctgaagccgattaacccggtcattccaacatcatacggattatcgtattcgacatgttctttaccgcgcagggcatgaacaataggcgctttaattttcccggcaaactcaactaactctttatgcgcccccgcgcagccgctgccacacatcagggcgatattgctggaataacgcagcagttgcgccagtttgcgtaactcttcttcttccggcgtcacgactggttgtggcgcatgataccagtgcatggttgccccttctggcgcaggttttaacgccacgtcgcctggtaacacgacaacgctaacgccacggttaagcaccgctttgcgcatggcaatcgccagtacttgtgggatctgctccgggctggaaaccagctcgcaatagtgactacattcgcggaatagctcttgtgggtgggtttcctggaaatagccgctgccaatttcgctggagggaatatgagcggcaatcgccagtaccggaacgtgattgcggtggcaatcgaacaggccgttgattaagtgcaggttgccggggccgcagcttccggcgcagaccgccagttctccgctaagttgtgcttcagcgccagcggcaaaggccgccacttcttcgtggcgggtggacatccactcgatggtgcccatgcgattaagactgtcactaagaccgttcagagagtcgcctgtgactccccagatgcgtttcacccctgcgctttcgagtgttttggcgatataagctgcaaccgtttgtttcatggttctccatctcctgaatgtgataacggtaacaagtttagttcatctgacggagggggaagggatgggagagaaaggaggcactaacggttaaatagcccgatgaaaggaatatcatcgggcataaggcgattatgcgagaaccaaatccccctgcggatggcaggagcaggccagtacgtaaccttcagcgatttcggcgtcggtcagcgtcattgtgctgctcaccgtatattcaccggaaaccacttttgtcttacagcagccgcaaacacccgcacggcaggcagcgacaaccggaacgttattgctttccagcgcctccagtagcgtggtgccaaccggggcgtaaaattctcgtgccggttgcagtttggtgaatttcagaccgctggtcgccgcttctgctactggggtgaagaatttctctttaaagaaacgcgtcacgccgagcgctttcacttcctgctctacccaatccatatacggagccgggccgcaggtcatcacggtacgactagctaagtcaggtacacctgccagcagttcgcgagtgagacgaccagcgataaagccttcggtaacgttattttctgccaccagcgttaccggatagttacgccactcatcggcgaaaataacatcctgcggcgtacgcacgttgtagatcacccgcacatcggcctgtggacggttcttcgcaagccagcgacgcatgctcataatcggcgtgacgccgcagcctgccgccagcaacaggaatttatcttctgctttatcgtcgcaggtaaattcccccatcgcgtcgctaagccagagataatcaccgcgttttacatcgcgcgtcagccactgggagccgacaccgtcatcaatccgccgcacggtcagggtgatatattcactcacgcctggcgtggaggaaatggtgtaagcacgcagcgtttccgcactgtttcgcacgctgaccagtgcatattgcccggcgcgatatgggtagtaatcgtggcaaatcagggaaatcgtccacacatccggcgtttcttgcgtaatgtgatgaacctgcatccgccacgggcattgattcgttggcatcgtcatcgacaaactccttacgcgctcaacagttgcttcatgtcttcttcaacagtggtgatagaacgcaggccgaatttctcgttcagcaccgccagcaggtctggtgtcaggaaaccaggtgcagtcgggccggtgacgatatttttcacgcccagagaaagcagcgtcagcagaatgacgatcgctttctgttcaaaccaggagagcaccaggctcagcggcagatcgttgacaccgcagcccagtttctctgccagagtgacagccagaataatcgcactgtaagcatcgttacattgacctgcatctaccagacgcggcagaccttcgatatcgccaaactcaagtttgttaaagcgatatttaccacaggcgagggtcaggatcaggcagtcatccggcacgctggtggcgaaatcggtgaagtagtggcgctcgccgcgtgcgccgtcacagccaccaagcaggaagatatgacgcagtttttcacggctcaccagatcaatcagcgtatcagcagcgccaagcagcgtctggcgaccaaaacccacggtgataaggtgcggaatttcgctgtacgggaagcctgccatctgttgcgcctgggtgataaccgcagagaaatcatcaccgtccagatgacgcacgccaggccagccaacaatgctgcgggtccagatacgatcgtcataagcgcctacggttgggtcgatgatgcagttgctggtcatcacgatggggccagggaaacgagcgaactccacttgctgattctgccagccgctgccgtagttaccgaccagatgcttgaatttacgcagctccgggtagccatgcgcaggcagcatttcgccgtgggtgtagacattaacgcccgtgccttcggtctgttccagcaggttgtagagatctttgagatcgtgaccggaaatcagaatgcatttacccgccgtcgctttgacgttgacctgggttggcgtcgggtgaccgtatttaccggtttcgcctgcatccagaatgctcatcactttgaagttcatctggccgatttccatactacactcaagaagcgcgttcatatcggcaggccaggtccccagccacgccatgattttatggtactgggcataaatatcgttgtcgtattgaccgagaacatgcgcgtgttccatataggccgccgcacctttcaggccatacaggcacagcagacgcaggccgagaatgttttcgccaatcgccgctttatctttgttaggggtaaattctgctgcctgacgttgcagctcgccgagatcgtcgctcaccagttgcaggtcagccatcgggttatcgacgcgcgcgttggcatctacagccaggcattgcgctttcagcgcctcgcgcagggcaatcgcttcacgagcgtagccgacaatacgcggagaatcgaagttaacgttggtcagggtactgaaaaaggcacgtggcgcgaagctgtcaacatcgtggttgatgatgccgtattcacgcgcttttaccgcccaggcagaaagcccttgcagcgccgcgatgagtaaatcctgaaggtcagaagtttccgccgttttaccacacatcccctgcgcgtaactgcagccgtttcctgccggagtacggatagtttgttcacattgcacacaaaacatgatcacaccttttaaagttatatttaatatacatgtttaaggttaagacgcttaacgcggggataaaagggatttttcatgcaactttaagggagattgatttagcgcaattttggcggcagggatctaccgccagagaggtattacgcagagaaaaaggcgatgaggatcggcactaacaggctaagaataaaaccgtgaacaattgccgccgggaccatatccagcccgccagtacgttgaagaacgggcagggtgaaatccatacttgtggcaccgcataagcccagtgcagtagagcggctgcggcgaatcagcccagggatcaacataatagcaatcagttcacgggccagatcattaaaaaacgccgcgctcccgattaccggaccaaaagattcggtcaataaaataccggaaagagaataccagccgaaaccggaggccattgccagcgcggtattgatggggagatcaagaataaaggcgttaattaaaccaccaattaaactactgacaaccaccaccacggcgacaatcattccccggcgattaaggacaatctgctttaaggtcatgccattattgcgcaactgaataccaacgaggaaaagtagcaaaattaacgtgtattcactggcttcggtcgcgtgttgtaagaaagccagtccacttagaccaatggcaaaaccaatcactactacgccgcacagttttaggctctccagcgccatcgcaatacggctcgggagtttttcttgctgatggtggttgcgccacggcaggcctcgctccagccacatcagggcggcaatattacacagtaaaataacggtaatactgacggcagaataatgcagaatcgccaacaggttactggcgaggttatcgagaaacgccagactgatacccataaaaaagagaataaggtaaaccatccagcttaatagctgattaataacttttaacgcagcttgttggcgaagcggaatgaggtaacccacaatcaggggaaccagaatgattaacagcccagaaaacatgaaaacccagtccttgcaaagatgaagtcgaaatgcgcgatgacacactactgaaagcggaaggacgagtaaagttgcaattaaaaggaaatgttatgcataaggagcagtagagtattcgttttcatttaaagatattcttgcgctttaattacaaactgcaccgatgttggtggcgtcaaaatcgccgaggcgttccctgaaggccggggcagcccacatggatgtgggctgagggcgcgttttacagggatgttacctcgcgcccgacccggtagccgtaagggataagtcgagggcaccgcgcagcggcgattttgttcgccagagcccgggggtgcagggggcggcggcgattggccgccccctgcgcgctccttgcgccagtggcaatatgttgcttagctcatgaaaggagcgcaacaagatgatgaatcaacatataacaacatcttaaaaaaaggcctgacattacgccaggccttctgcgttaattaatcacgcttttccagcagggtccggtaaatcagaccaccgataatgccgccgacaattggcaccacccagaagaaccacagttgttctaatgcccagccgccctggaagatagcaaccgcggtgctgcgcgccgggttaacagaagtgttagtcaccggaatactaattaagtgaatcagggttaaggccagaccaatagcgatcggcgcaaaacctgccggcgcgaatttgtcggttgcgccgtggatcaccaacaggaaacctgcactcaataccagttcaactaccagcgcggaaagcatggaataaccgcctggactatgctcgccataaccgttagaagcaaaaccgctggctgccgcgtcaaaacccgttttaccactggcaattaaatacagcagcgccgctgcaacaataccgccgacaacctgggcaattacgtagccaacgacttcttttgccggaaaacgtccgccagcccataaaccaatagtgaccgccgggttaaaatgaccaccagaaatatgaccaacagcaaaggccatcgtcagaacggtcagaccgaacgccaacgccacgccggcaaaaccaatgcctaattccgggaagcctgcggccagtacagcactaccacagccaccaaaaacaagccagaaagtaccaaaacattcagctgctaattttctgaacatatccaccacaattaaaaattgaccctgtgaaaaatatggtcgttttatagggtcgtcgtaaaaaagtgacgacggaaataatgcgcggctattttaaaaacgaaggcgagtcattcaccagataaataaatccagtaaatttgatttagggcaacagcgggttgccccatatagtcatttgtctgattgacagtgtagtgcacgcaaaagatttaatcctttaggcgtaataaaaaataatttatcatgctaattatttgattttgttgtttttgcagacttatcagcaagagggagtataacgcgattattcgctcatttttcagacatttgccatgcttaaatgtgatgtcatcacgtattagcaaggcctttcccgttatactgccagcgtaaaggataagtcacatatttctggaggggatatgattcttgagcgcgttgaaattgtgggttttcgcggtatcaaccgtttgagcttgatgctggaacaaaacaacgtcctgattggggagaacgcgtggggtaaatccagcttgctggacgccttaactctgctgctaagcccagaaagtgatctctaccattttgagcgcgacgatttctggttcccgccgggagatatcaacgggcgagaacatcatctgcatattattttgaccttccgcgaaagcctgccaggccgacatcgggttcgccgttatcggccgctggaagcgtgctggacgccatgcaccgatggctatcaccgtattttttatcgtctggaaggggagagtgcggaagacggcagcgtgatgacactgcgcagttttctcgataaagacggacatccgattgatgtcgaggatattaacgatcaggcacgccatctggtgcgtttaatgccggtgctgcgcttgcgtgatgcccgttttatgcgccgtattcgtaacggcacggtgccaaatgtccctaatgtggaagtcaccgcgcgccagctcgatttcctcgcccgtgagttatccagtcatccgcaaaatctctctgatgggcagattcgtcagggactttccgcaatggtacagctgcttgagcattatttctctgagcagggggccggacaggcgcgatatcgtttaatgcggcggcgagccagcaatgagcaacgaagctggcgctatctggatatcatcaaccggatgattgaccgacctggtgggcgcagctatcgggttattttgctcggcctatttgctactttgttgcaggcaaaaggcacattgcgactggataaagacgcccgtccattgttgctgatcgaagatccagaaacccgtttacaccccattatgcttagtgttgcctggcatctgttgaatcttctgccattgcagcgcattgccaccaccaacagcggtgagttgcttagcttaacgccggtagagcatgtttgccgactggtacgtgagtccagccgcgttgccgcctggcgtctggggccgagtggcttgagtaccgaagatagccgacgcatatcctttcacattcgttttaaccgtccgagtagcctgtttgcacgctgctggttgctggtggaaggggaaacggaaacctgggttatcaatgaactggcgcgtcagtgcggacatcattttgatgccgaagggatcaaggtcattgagtttgcccagtccgggctaaagccactggttaaatttgcccgccgaatggggattgaatggcatgtactggtcgatggcgatgaagcagggaagaaatatgccgctacggtacgcagcctgttgaataacgatcgggaagccgaacgagaacatttaacggcgttaccggcgctggatatggaacattttatgtatcgccagggattttccgatgtgttccaccgcatggcgcaaatcccggaaaatgtaccgatgaatctacgcaaaattatcagcaaagcgatccatcgctcttccaaacccgatcttgccattgaagtggcaatggaggcaggacgtcgtggtgtggactccgtaccgacgctgctgaaaaaaatgttcagtcgcgtgctgtggctggcgcgcggtcgcgcggattaaccgcgaaacatcgtggccatttgtggctgaatagcgtcgagcatctcatagcgccgacggtattcagcccgttttttactggcgatttcggcaatctcttttcgtgctatctgtgctggaaggcggtaatggcgttcagcatcacatacgccgccaacgctttcccagaaagcgttgtaatcagcgtggatcttgccttctttatcgcgataacgcaggctgcggtaaatatgcgtttcattgctgacggcaataatctgctctacctgcaaacgttgggcaaacagacaggccgcttccatcacgaggcgtttgggaaatagcccgtggcaggctttcgtcgcattctggatttcctgatgtggaatttcccattttgcgccttgcagtccgccaataaacatcgttcttttcccctgatattcacacagggtaaacgtgatctctgccagaggaataccttcgctgttgcggaacaggattgtgctgtcaccttctttatccatactgatcatcatggtcagctcaagcgtgaactgctcgccgtttttgccttccagcttcgccagttgcagcccgggggtattcaaatataagctgaattcttccgcgctcatacattcgcggagtaacgcataatggtaacgtaacgcctccagcaattgcttacggctaagattcgccgcaaggtaagggcgatgcagacgcacaggcagtcgcggctggcgcgttaacaatacattgagattaggccagtgggaaagttcgttcatccactcaacgcttaaacgcggcataatcaagctgcgcagcaaaaatttctggcgaaaactacggcgatgccagaatttacccggccgacactgtccacgtgccagactaagaaaaagactcaggctgctgagagattcagatggcgtaaaggtccgttcagttagctggctcatattcatgaaatcaatggttatacatggcgtgcttttcaccattgcgtatcttaaccaaacatcaatagtgtgattactaacgtaaattttagggttttgttgatatttcgttgaagttaatgacccggattggcatatggagtattcagaaaatttatgaaaaagcggaaaaccgtgaagaagcgttacgttattgcgctggtgatagtcatcgccggactgattacgttatggagaattcttaacgcacccgtgccgacttatcagacgctgattgtgcgccccggtgatttacagcaaagcgtgctggcgaccggaaagctggacgcgctgcgtaaggttgatgtgggcgcgcaggtcagcggtcagttgaaaactctgagcgtggcgattggcgataaagtaaaaaaagaccagcttttaggggttattgatcctgaacaggctgaaaaccagattaaggaggtcgaagcaacgctgatggagctacgtgcgcagcggcagcaggcggaagcggagctgaaactggcgcgggtgacgtattcccgtcagcaacgtctggcacaaacgaaggctgttagtcagcaggatctcgacaccgccgcgacggagatggctgtgaaacaggcgcaaattggcaccattgacgcgcaaatcaagcgcaatcaggcttctctcgatacggctaaaaccaatctcgattacactcgcatcgttgccccgatggccggggaagtcacgcaaatcaccactctgcaaggccagacggtgattgccgcacaacaagcaccgaacattctgacgctggcagatatgagcgccatgctggtaaaagcgcaggtttctgaagcggatgtaatccacctgaagccggggcaaaaagcctggtttacggtgcttggcgatccactgacgcgctacgaggggcaaatcaaggatgtactaccgacgccggaaaaggttaacgacgctattttctattacgcccgttttgaagtccccaaccccaatggtttgctgcggctggatatgactgcgcaagtgcatattcagctcaccgatgtgaaaaatgtgctgacgatccctctgagcgcgttaggcgatccggttggcgataatcgttataaagtcaaattgttgcgtaatggtgaaacacgcgagcgtgaagtgacgattggcgcacgtaacgataccgatgttgagattgtcaaagggcttgaagcgggcgatgaagtggtgattggtgaggccaaaccaggagctgcacaatgacgcctttgctcgaattaaaggatattcgtcgcagctatcctgccggtgatgagcaggttgaggtgctgaagggcatcagcctcgatatttatgcgggtgagatggtcgcgattgttggcgctagcggttccggtaaaagcaccctgatgaatattctcggctgtctggataaggccaccagcggcacctatcgcgtcgccggtcaggatgttgccacgctggacgccgatgcgctggcgcaactgcgccgcgagcatttcggctttattttccagcgttaccatttgcttagccatttaaccgccgagcagaacgttgaagtacccgccgtctatgctggtcttgagcggaaacagcgactgcttcgtgcccaggagttgctgcaacggctggggctggaagaccgtacagagtattatccggcacagcttagcggtggtcagcaacagcgcgtcagcatcgcgcgggcattgatgaacggtggtcaggtaattcttgccgatgaaccaaccggcgcactggacagccattctggcgaagaggtgatggcgatcctgcatcagctgcgcgatcgtgggcatacggtgattatcgtcacccacgatccgcaggtcgctgctcaggccgagcgggtgatcgaaattcgcgacggcgaaattgtgcgcaatcctcccgccattgaaaaagtgaatgttactggcgggacggaacctgttgtcaacacggtgtctggctggcggcagtttgtcagcggttttaacgaggcgctgacgatggcatggcgggcgctggcagcgaataaaatgcgtactttactgaccatgctggggattattatcggtattgcgagcgtggtttccattgtcgtggtgggtgacgccgccaaacaaatggtgctggcggatattcgttctattggtacgaatactattgatgtctatcccgggaaagattttggcgatgacgatccgcaatatcagcaggcgctgaagtacgacgacttaatcgccatccaaaaacaaccgtgggtcgccagtgccacacctgccgtcagccaaaacctgcgcctgcgttataacaatgttgatgttgctgccagtgccaatggcgtgagcggcgattattttaatgtctatggcatgaccttcagtgaaggaaacacctttaatcaggagcagctgaacggtcgtgcgcaggtcgtggttctcgacagtaatactcgccgccagcttttcccccataaagcagatgtggttggcgaggtgattctggtcggcaatatgcccgccagagtcattggtgtggcggaagaaaaacagagcatgtttggtagcagtaaagtgctgcgtgtctggctaccttacagcacgatgtccgggcgagttatgggccagagctggcttaactccattactgtcagggtgaaagaaggatttgacagcgccgaggcggaacagcaactcacgcgtttacttagtctgcgccacggaaagaaggatttctttacctggaacatggacggcgtcttgaaaactgttgaaaagaccacacgtactttacaactgtttctgacgctggtggcggtgattagcctggtggtgggcggtattggtgtaatgaatattatgctggtgagtgtgaccgagcggacgcgggaaattggcattcgcatggctgtaggtgcgcgagcaagcgatgttttgcaacagttcctgatcgaagccgtactggtttgcctggtcggtggcgcgttgggaataacactgagtctgttaattgctttcaccttgcagcttttcttacccggctgggagattggttttagtccgttggcgctgctgctggcgtttctctgcagcacggtcaccgggattttatttggctggttacccgcacgaaatgcggcacgactggatccagtagatgctctggcacgagagtaatttttgagataaaaatgccagccgatcgggctggcattttgcctttaggatgtacacaatgagacagaagagttatgcgactgccgcttctacttcgacgggcacaataacactggcgtgattgccttttggcccctggtggacatcaaactgaacggattgtccagcttttagcgttctgtaaccatccatctgaatggtggaataatgagcgaaaatatcttcgccgccgccttcagggcagatgaaaccaaaccctttggcattgttgaaccacttaacagtacccttttccatgcttcgacatccttcgcaaatcttatacaagtaagatggaataaaccggggtcagagagggggctgttcaaaacctcgccaactctagaaatacaatttagagaattagggcgagccgtcaagcatttgacaggggacaaggggcaggtatgaatcaaaaatttgaagcagttaacgctattgacaggaatgtgacagatgtcgctgatgccaacgatagatgatagttatctatcatgtggagtagattggtcaggcaaataagctcttgtcagcggcagggcgttctgccgataaccgtaaccgaagatgataactgacaatgggtaaaacgaacgactggctggactttgatcaactggcggaagaaaaagttcgcgacgcgctaaaaccgccatctatgtataaagtgatattagtcaatgatgattacactccgatggagtttgttattgacgtgttacaaaaattcttttcttatgatgtagaacgtgcaacgcaattgatgctcgctgttcactaccaggggaaggccatttgcggagtctttaccgccgaggttgcagaaaccaaagtggcgatggtgaacaagtacgcgagggagaatgagcatccattgctgtgtacgctagaaaaagcctgaatgcaggcataaaaattgggggaggtgcctatgctcaatcaagaactggaactcagtttaaatatggctttcgccagagcgcgcgagcaccgtcatgagtttatgaccgtcgagcacttgttactggcgctgctcagtaacccatctgcccgggaggcgctggaagcgtgttctgtggatttggttgcgctccgtcaggaactggaagcctttattgaacaaaccacacccgttctgcctgccagtgaagaggagcgcgacacacagccgacgctgagttttcagcgtgtactgcaacgtgcggtcttccatgtccagtcctccggtcgcaatgaggttaccggtgcaaacgttctggtcgctatctttagcgaacaggagagccaggcggcatatctgttgcgtaaacatgaagtcagccgtctcgatgtggtgaactttatctctcatggcacgcgtaaagacgagccgacacagtcttctgatcctggcagccagccaaacagcgaagaacaagctggtggggaggaacgtatggagaatttcacgacgaacctgaatcagcttgcgcgcgtgggcggaatcgacccactgattggtcgtgagaaggagctggagcgtgctattcaggttctctgccgtcgccgtaaaaacaacccgctgctggtgggggaatctggtgtcggtaaaaccgcgattgcggaaggtcttgcctggcgaattgttcagggcgatgtgccggaagtgatggctgactgtacgatttactctctcgatatcggttctctgttagcgggcacaaaatatcgcggcgactttgaaaaacgttttaaagcgttgctcaagcagctggagcaggacactaacagcatcctgtttattgatgagatccacaccattatcggtgcgggtgcagcgtctggtggtcaggtcgatgcggctaacctaatcaaaccgttgctctccagcggtaaaattcgtgtaattggtagcacaacctatcaggagttcagcaacattttcgagaaagaccgtgctctggcgcgtcgcttccagaaaattgatattactgaaccgagcatcgaagaaactgttcaaatcatcaatggcctgaaaccgaagtatgaagcgcaccacgacgtgcgttataccgcaaaagcggtgcgtgcggcggtagagctggcggtgaaatacattaacgatcgtcatctgccggataaagccattgatgttatcgacgaagcgggcgctcgcgcacgcctgatgccggtaagcaaacgcaagaaaaccgttaatgtggcggatattgagtccgtggtggcccgtattgcacgcattccagagaagagtgtttctcagagtgatcgtgataccctgaaaaacctcggcgatcgcttgaaaatgctggtcttcggtcaggataaagccattgaggcgctgactgaagccattaagatggcgcgtgcaggtttaggtcacgaacataaaccggttggtagcttcctgtttgccggccctaccggggtcgggaaaacagaggtgacggtacagcttagcaaagctttgggcattgagcttctgcgctttgatatgtccgagtatatggaacgccataccgtcagccgtcttattggtgcgcctccgggatacgttggttttgatcagggcggtttgctgactgatgcggtcatcaagcatccacatgcggtgctgctgctggacgaaatcgagaaagcgcacccggacgtgttcaatattctgttgcaggtgatggataacggtacgctgaccgataacaacggacgcaaagcagacttccgtaacgtggtgctggtgatgaccaccaacgccggggtacgggaaactgagcgcaaatccattggtcttatccaccaggataacagcaccgatgcgatggaagagatcaagaagatctttacaccggaattccgtaaccgtctcgacaacattatctggtttgatcatctgagtaccgacgtgatccatcaggtggtggataaattcatcgtcgagttgcaggttcagctggatcagaaaggtgtttctctggaagtgagccaggaagcgcgtaactggctggccgagaaaggttacgaccgggcaatgggcgctcgtccgatggcgcgtgtcatccaggacaacctgaaaaaaccgctcgccaacgaactgctgtttggtagcctggtggacggcggtcaggtcaccgtcgcgctggataaagagaaaaatgagctgacttacggattccagagtgcacaaaagcacaaggcggaagcagcgcattaatctgattgttaggtaggttggtcaagtccgtaatctcgaaagaggttacggactttttgtttatggggtggaggaggttcagaccctttttttaatgatgatggtaagttgttgataattagtgctgcgggaaggtaaggataaaaaagggtgctgcaggagaatgggatggttttgctttattaacaacgggctaaacgtgtagtatttgagttcactgccgtacaggcagcttagaaattcacaggtaacatactccacccgcccaccatgttcactgccgtacagacagataaaatgcgaaaaaaaagctcgcactttcgtacgagctcttctttaaatatggcggtgagggggggattcgaacccccgatacgttgccgtatacacactttccaggcgtgctccttcagccactcggacacctcaccaaattgttttgctaccaaacctcatgggtggcaacggggcgctactatagggagttggagtaaaacggtcaagaagaattttaatgataattattgtttgctcatactgtaaacaagttgtgcagtatatctacatcgagacaagttacggacttatacttccaaagtacttcatacatatcacaaaataaaaaggccggttaaaccgaccttttactcgttctttctcttcgcccatcaggcggtaaaacaatcagcgactacggaagacaatgcggcctttgctcaggtcgtacggggtcagttcaacagtcactttgtcgcccgtcaggatgcggatgtagtttttgcgcattttaccggagatgtgtgcagtaaccacgtgaccgttttctaactctacgcggaacatggtattaggcaacgtttcaagaacggtaccttgcatttcaatattgtcttctttggccatctaatcctctggggtatcactaccgtaatttgaaccggcaagataatgccgaagttctgtaaataagtaaagatttgcgcgctaaatcgcaacaaacaggttcggcacattactccgaaaacacacggctaagccgcaccaaaagcgcaacgtataagggagcggtgagataaacgatgggcgttacctgacgcgaaaaattccttatcggcagcggggtaatgagcgtaaccaactctgcgaccgcaattataacactctggggagaaatgtgccgaaaacattcattcttgtggactaaacaagcatcgtggtacccagaaattattcggcaatcgtccgaggcgcatttgattgagataattaaggtaatcccggcggggaatttcgcaggcaccaaggcttgctgtgtgatcgttaaggacctggcagtcgataagcttaccgccatgaccgataaattcctcacagaataccagaagcgccgttttagacgcattttccatccggctgaacatggactcgccacaaaatagcgttccctgggccacgccgtacataccgccgacaagctcatcttcacgccagacttcaatggagtgggcatggccgagttcgtgaaggcgatggtaggcttcgaccacgccacgcgtgatccaggttccttcttcgcgatcgctggcacagccttcaatgacctgaccaaaagcgtaattcatcgtgacacgataggggctgcgtttatgaaatcgcttcatactacggctgatatgcagactttctggccatagcaccgcgcggggatcggggctccaccagaggatggggtcgcctggagaaaaccacggaaaaataccacgctggtaagccattaacaggcgcgcagggctaagatcgcccccaagtgccagcaggccgttaggctcacgtaatgcgccttccggggaagggaaggctatactatggcgagaaagctgaaccaggcgcatgaccgcaaaactccacgcaagtcggatcgttcaataatagcttacaaaccctgcttgaactggtaataacgcccctgtctggcaagcagttctgcgtgagtaccttgctcaataatttgcccgttgtccatcactattatttgttggaaacgagagagtccgcgaagtcgatgggtgaccattaacaccgttttctcacgcatcatttctgcaagcaattcaaggatctggctttcggttgtggcatctaagccttcggtaggttcatccagcaacaccagtggcgcatcatgtaacagcgcacgggcgatagccagacggcgcagttcaccaccggagagctggcgtccgccttcacctaaccaactgttgagacctgcatcctcgagcagcttttccaggccaacgcgacgcaagatctcgctcagagcctcatcactactgccagggctggcgagtaaaagattatcacgcagcgtggcgctaaacagatgcactcgctgaggaacaacgctgatggtctgtcgtagagccgcttcattcaggctggctatggggctatcgttaagcaaaatctcgccctgttgcgggtcccatgcgcgggtcagctgttgtaacagtgtacttttgccgcatccggttcgcccgagaatcgctatatgttccccggcgtttacctgaagagaaatccctttaagtgcctgttgagattgctccggataagtgaactgaacatcccgtaacgtcaggctaacgcgatcggcaacacgagtttgggtatcaggaaaggtgacctccggtttttgatccgttaagtcagagatacgtacggcagaggcaatgacttgccccagatgctgaaatgcacccgttactggtgccagtgcttcaaacgcggctaacgcgcagaagacaaacagggcaattaacgcgccgggttgagcattgccgccaacgccgccagacgccatccacagcatcaggatcaccgctaacgcgccaatgagcagcattatcgcttggctcaatgcggtcagttcagattgacggcgttgcgcttccagccattgaatttctgtattctctagttgcgtgcgataacgatcgctggcaccaaaaatggtcagctcagcttgcccttgcagccaggccgtcagttgttggcgatactgtccgcgaagatgagtcagattttgcccggtgctttttcccgcacgataaaacagcggtggcatcaggaaaagcgtcagtaacataatgccgcccagcgtaaaggcgagggtgaaatcaaggaaacttaacccgattgtcaccaccataatcaccacaaaagcgcccaccagcgggctgataacgcgcaggtaaagatgatcgagcgtatcaacatccgccaccacgcgattgagcaattcgccctgacgatagcgcgccagtccggcaggggagaggggcagcaatttgctgaaggtgtaaatgcgcagatgctgcaacacgcggaaagtcgcgtcgtgacttaccagacgttcaaaatagcgcccggcagtacgggtgattgctgcgccacgcacgcccgcagcgggtagcatatagttgaagctgtacagtccggcaacccccgcaaccgcactggcgctgaggaaccagccggaaagtgtcaacagaccgatactggcgagcagcgtcacaattgccagcacaataccaagacttaacatccatttatgacgtttatacagtgccagatagggtagcaaagcgcgcatttaaatctcctcctgacgatgggccagtaatgtggcgaatgggccaccagccacacttaattccgcgtaacgtccttgctcaataatccggccatcctgcataacccaaatgacatcccagtcagcaagatcttctaactggtgggtgaccattaacgttgtctggcgcagagaggcggcattcagcgcctccattacgcgctgttcactgtgagcatcaaggctggcagcgggttcatccaacagtaataggctacagggatttagtaacgcacgggccaccgccacgcgctgcgcctgccccacggaaaggcgggcagcctggtcgccaacaggcgtatcaacgccttgtgggaggagcggtagaaactcgctgacccaggcgttatccagcgctgcttgtaattcttgttcgctggcatcaggtcgcgccagtagtacgttatcccgcaatgttgctgccggtaattgtgggttttgcccaacccaggagagatgtttacgccaactttctggacttaaatcgcgtaattctatcccgttgattcgtaggcttccctgataactgagaaaaccagaaagcgcgttcagcagactgcttttaccactaccgctgcgaccaaccaacaccgcacgttggcctgctggcaaagtaaagttcagcggtccggccagcgttttaccttccgggctcgtgataaacagctcctcggcctcaatggtcaccggatcggtgcttgctaattccgcctcaccacgttgcggatgggcgagcggggtttccataaacgttttcagactgtcagctgcgccaacagcctgggctttagcatgataaaacgtaccgagatcgcgtaatggctggaaaaactctggcgcaaggatcagggccagaaaacccgcagccagcgtcacaccggtatcgtagtgaccaaaatccagctcgccgagataggaaaaaccaaagtagaccgccaccagagcaatactcaggctggtaaaaaattcgagaatgccggaggataaaaacgccagccgtagcacttccattgtccgttggcggaaatcttcgctagcagaacgaatactttcaatttcagcttcaccacgaccaaaaatacgcaatgtttccatgccgcgcaggcgatcgaggaaatgcccacttaagcgagcaagagcgagaaagttacgtcggttagcatcggcagcccccattccaaccagcgccataaacaacggaattaacggtgcagtgcccagcagaatgagcgccgcagcccagttagaggggaagattgccaccacaatcagcaacggcacgctcactgccagcgccatttgcggcagatagcgtgcatagtaatcatgcatatcgtcaatttgctcgagtaccagcgtcgcccagctccccgcaggtttaccctgaatccacgctggccctgcttgttgcagacggtcgagaacctgacggcggatggcaaagcggatatgctgcccggcgtgataacccacccgttcgcgtaaccagaccacccatgcgcgcagtacaaaggtcagaaccagtaacgtaaagggaagcagcagggcttcacggggaatattctccataatcatatgttgcagaattcgcgccatgaaccaggcctgggcaatgatcaatatgccgctcacaaagcccagcagacgagaaatattcagccaacgttgggagatgacgctttgctgttttaaccagcgggttaactctttttgacgagatttattcattgcacgcttagcaggtgagttatcagaattatttgcagagcaatgttacaacggggaaaaaataaaggcgacccatagtcgcatggtgtcgccttctttacttttgttactgatttgtaaaattattttgcgtcagctaaaccatcgaggtagcgttccgcatcaagtgctgccatgcagcctgtaccggcgctagtaatggcctggcgataaatgtgatccatcacgtcgcctgcggcaaagacgccaggaatgctggtctgggtggcattaccatgaataccgctctgtactttgatgtagccgttttccagttccagctgcccttcgaaaatcgcagtattcgggctgtgaccgatagcaacaaacagaccggcaacgtcgagactctcgatgttatcgctgttttgcgtatcgcgcagacgaacgccagtgacacccatttgatcgccggtcacttcttccagcgtacggttggtgtgcagaatgatgttgccgttctccactttatccatcaggcgcttaatgaggattttttccgcgcggaaaccgtcacggcggtgaatcagatgcacttcgctagcgatgttagacagatacagcgcctcttcaaccgcggtattgccgccgccgatgaccgcaactttctggttgcgatagaagaaaccgtcgcaggttgcacaagcagaaaccccacggcctttaaaggcttcttcagagggcaggccgagatagcgtgcagaagctccggtggcaataatcagcgcgtcgcaagtgtattcgccgttatcgccattcagacggaacggacggttttgcagatccaccttgttgatatgatcaaaaatgatctcagtttcaaacttggtggcatgttcgtgcatgcgctccattaataacggaccggtcagatcgtttggatcgccaggccagttttccacttccgtggtggtggtcagttggccgcctttttccatgccggtaatcagcacaggttgcaggttggcgcgcgccgcgtagacagcagcggtgtatcccgccgggccactacccaggataagcagtttactgtgtttggtcgtgcccatgagatccccatagttgttggcagacaatgggcaggattgtagggaatttacagacgtaaaaaaagagtatgacgattttgttaacaatttgtgcaatcggcagcatcgataagcaggtcaaattctcccgtcattatcacctctgctacttaaatttcccgctttataagccgattaaatgatgaataaacgcccctgttaatgaatatctggcatgttgtactaaaaatcgatgttttgctttgacaatcccctggtgttttgcgaaaacattcgaggaagaaaaaaaacagtattcttatatgcgcataaccatgcatgtaaataccatgtttaccgtgctagtgaaatctacgtatggcgtggacagacgccattcgtgatgtcgatagctgccacaaggcaacggtcttctcaccgtagacccaggcattgcgcgccgtgaatcttcatgatttcggtctatcgtgacgggtagcgactctgaacagtgatgtttcagggtcagacaggagtagggaaggaatacagagagacaataataatggtagatagcaagaagcgccctggcaaagatctcgaccgtatcgatcgtaacattcttaatgagttgcaaaaggatgggcgtatttctaacgtcgagctttctaaacgtgtgggactttccccaacgccgtgccttgagcgtgtgcgtcggctggaaagacaagggtttattcagggctatacggcgctgcttaacccccattatctggatgcaagtcttctggtattcgttgagattactctgaatcgtggcgcaccggatgtgtttgaacaattcaataccgctgtacaaaaacttgaagaaattcaggagtgtcatttagtatccggtgatttcgactacctgttgaaaacacgcgtgccggatatgagtgcctaccgtaagttgctgggggaaaccctgctgcgtctgcctggcgtcaatgacacacggacatacgttgttatggaagaagtcaagcagagtaatcgtctggttattaagacgcgctaacacggaacaggtgcaaaatcggcgtattttgattacactcctgttaatccatacagcaacagtactggggtaacctggtactgttgtccgttttagcatcgggcaggaaaagcctgtaacctggagagcctttcttgagccaggaatacattgaagacaaagaagtcacattgacaaagttaagtagcggccgccgccttctggaggcgttgctgatccttattgtcctgtttgccgtctggttgatggctgccttactaagctttaaccctagcgaccccagctggagccaaacggcctggcatgaacctatccataatttaggtgggatgcccggtgcgtggttggcagatacgctgttctttatttttggcgtgatggcttacaccattcccgtcattattgtcggcggttgttggtttgcctggcgtcatcagtccagcgacgaatacattgattattttgccgttagcctacgcatcattggcgttttggcgctcatccttacctcctgtggtctggcggcaatcaacgctgacgatatctggtattttgcctccggtggcgtcattggcagcttactaagcactacgctacaaccactgctacacagtagcgggggaactattgcgctgctctgcgtttgggcagcgggcctgacgttgttcaccggttggagttgggtgaccattgctgaaaaactcggcggctggattttaaacattctcaccttcgccagtaatcgtacccgtcgcgatgatacctgggtcgatgaagatgagtatgaagacgacgaagagtatgaagatgaaaatcacggcaaacagcatgaaagtcgccgtgcccgtattcttcgcggcgcgctagcgcgtcgtaaacggttggcggaaaaattcattaatccgatggggcggcaaacagacgctgcgttgttctccggtaagcggatggatgatgacgaagagattacctacactgcacgcggtgtggctgccgacccggacgacgtcctatttagcggcaatcgtgcaacgcagccagaatatgacgaatacgatccattattaaacggtgcgccaattaccgaacctgtcgctgtagcagctgctgctaccacggcgacacaaagctgggctgcgccggttgaacctgtgactcagacgccgcctgttgcctctgttgatgttccacctgcgcaacctacagtagcctggcagcctgtaccgggtccacaaacgggagagccggttattgctcctgcaccggaaggttacccacagcagagtcaatatgcgcagcctgcagtgcaatataatgagccgctgcaacaaccagtacagccgcagcagccgtattatgcacctgcagctgaacaacctgcgcaacagccgtattatgcccctgcgccagaacaaccggtggcaggtaacgcctggcaagccgaagagcagcaatccacttttgctccacagtctacataccagactgagcaaacttatcagcagccagccgctcaggagccgttgtaccaacagccgcaacccgttgaacagcagcctgttgtggagcctgaacccgttgtagaagagacaaaacccgcgcgtccgccgctttactactttgaagaagttgaagagaagcgagcccgtgaacgtgaacaacttgcggcctggtatcaaccgattccagaaccggttaaagaaccagaaccgatcaaatctagcctgaaagcaccttctgttgcagcagtacctccagtagaagccgctgccgctgtttccccgctggcatctggcgtgaaaaaagcgacactggcgacgggggctgccgcaaccgttgccgcgccagtcttcagtctggcaaatagcggtggaccgcgtcctcaggtcaaagaggggattggtccgcagttgccacgaccgaaacgtatccgcgtgccaactcgtcgtgaactggcgtcttacggtattaagctgcccagtcagcgtgcggcggaagaaaaagcccgtgaagcccagcgcaatcagtacgattctggcgatcagtacaacgatgatgaaatcgatgcgatgcagcaggatgaactggcacgtcagttcgcccagacacagcagcaacgctatggcgaacagtatcaacatgatgtgcccgtaaacgcagaagatgcagatgctgcggcagaggctgaactggctcgtcagtttgcgcaaactcaacaacaacgttattccggcgaacaaccggctggggcgaatccgttcagcctggatgattttgaatttagcccaatgaaagcgttgctggatgatggtccacacgaaccgttgtttacgccaattgttgaacctgtacagcagccgcaacaaccggttgcaccgcagcagcaatatcagcagccgcaacaaccagttccgccgcagccgcagtatcagcagccacaacagccggttgcgccgcagccacaatatcagcagccgcaacaaccggttgcgccacagcagcaatatcagcagccgcaacaaccggttgcgccgcagcagcagtatcagcagccacaacagccagttgcgccacaaccgcaggataccctgcttcatccgctgttgatgcgtaatggcgacagccgtccgttgcataaaccgacgacgccgctgccttctctggatttgctgacaccgccgccgagcgaagtggagccggtagatacctttgcgcttgaacaaatggctcgcctggtggaagcgcgtctggctgatttccgtattaaagccgatgtcgtcaattactctccggggccggttatcactcgctttgaattgaacctggcaccgggcgtaaaagcggcgcgcatttctaacttgagtcgggaccttgcccgtagtcttagcacggtggcggtgcgtgtcgttgaagttattcctggcaaaccctatgtaggtctggagttaccgaataaaaaacgacaaaccgtttatctgcgcgaagttttggataacgccaaattccgcgataatccgagcccattaaccgtggtgctgggtaaagatatcgccggtgagccggtggttgccgatctggcgaaaatgccgcacttgttggttgcggggactaccggttccggtaaatctgtcggtgtgaacgcgatgatcctgagcatgctttataaagcacagccagaagatgtgcgtttcatcatgatcgacccgaaaatgctggagcttagcgtttatgaaggcattccgcatctgttaacggaagtcgttactgatatgaaagatgccgccaacgcgctgcgctggtgtgttaacgagatggagcgtcggtataaactgatgtctgcgctgggtgtgcgtaatctggcgggttataacgaaaaaattgctgaagccgatcgcatgatgcgtccgattccagacccgtactggaagccgggtgacagtatggatgcccagcatccggtgctgaaaaaagaaccatacattgtggtgttggttgacgaatttgccgacctgatgatgacggtaggtaaaaaagtggaagagctgatagcacgtctggcgcaaaaagcccgtgccgcgggtatccacctcgtactggcaactcagcgtccaagcgttgatgttattactggtctgattaaagcgaatattccgacccgtatcgcctttaccgtatccagtaagattgacagtcgtaccattcttgatcaggctggcgcggaaagtctgctgggtatgggggatatgctctactctgggccgaactccacgttgccggtacgtgtccatggtgcttttgttcgcgatcaggaagttcatgccgtggtgcaggactggaaagcgcgtggtcgcccacagtatgttgatggcatcacctccgacagcgaaagcgaaggtggtgcgggtggtttcgatggcgctgaagaactggatccgttgttcgatcaggcggtgcagtttgtcactgaaaaacgcaaagcgagtatttctggcgtacagcgtcagttccgcattggttataaccgtgcagcgcgtattatcgaacagatggaagcgcaggggattgtcagcgaacaggggcacaacggtaatcgtgaagtgctggccccaccgccgtttgactaactaatgcatcgtatgccggataaggcgcggtagcgtcgcatccggcactctatcaactgaaaattcagtattttcttctttcctcaagctgattattagcctggaatagagagtagagggaactcccgatcgggagtgacgtaatttgaggaataatgatgaaaaaaattgccatcacctgtgcattactcagtagcttagtagcaagcagcgtttgggctgatgccgcaagcgatctgaaaagccgcctggataaagtcagcagcttccacgccagcttcacacaaaaagtgactgacggtagcggcgcggcggtgcaggaaggtcagggcgatctgtgggtgaaacgtccaaacttattcaactggcatatgacacaacctgatgaaagcattctggtttctgacggtaaaacactgtggttctataacccgttcgttgagcaagctacggcaacctggctgaaagatgccaccggtaatacgccgtttatgctgattgcccgcaaccagtccagcgactggcagcagtacaatatcaaacagaatggcgatgactttgtcctgacgccgaaagccagcaatggcaatctgaagcagttcaccattaacgtgggacgtgatggcacaatccatcagtttagcgcggtggagcaggacgatcagcgcagcagttatcaactgaaatcccagcaaaatggggctgtggatgcagcgaaatttaccttcaccccgccgcaaggcgtcacggtagatgatcaacgtaagtaaaggcacctgagtgagcaatctgagcctcgattttagcgataatacttttcaacctctggccgcgcgtatgcggccagaaaatttagcacagtatatcggccagcaacatttgctggctgcggggaagccgttgccgcgcgctatcgaagccgggcatttacattctatgatcctctgggggccgccgggtaccggcaaaacaactctcgctgaagtgattgcccgctatgcgaacgctgatgtggaacgtatttctgccgtcacctctggcgtgaaagagattcgcgaggcgatcgagcgcgcccggcaaaaccgcaatgcaggtcgccgcactattctttttgttgacgaagttcaccgtttcaacaaaagccagcaggatgcatttctgccacatattgaagacggcaccatcacttttattggcgcaaccactgaaaacccgagctttgagcttaatagcgcactgctttcccgtgcccgtgtctatctgttgaaatccctgagtacagaggatattgagcaagtactaactcaggcgatggaagacaaaacccgtggctatggtggtcaggatattgttctgccagatgaaacacgacgcgccattgctgaactggtgaatggcgacgcgcgccgggcgttaaatacgctggaaatgatggcggatatggccgaagtcgatgatagcggtaagcgggtcctgaagcctgaattactgaccgaaatcgccggtgaacgtagcgcccgctttgataacaaaggcgatcgcttttacgatctgatttccgcactgcataagagcgtacgtggtagcgcacccgatgcggcgctgtactggtatgcgcgaattattaccgctggtggcgatccgttatatgtcgcgcgtcgctgtctggcgattgcgtctgaagacgtcggtaatgccgatccacgggcgatgcaggtggcaattgcggcctgggattgctttactcgcgttggcccggcggaaggtgaacgcgccattgctcaggcgattgtttacctggcctgcgcgccaaaaagcaacgctgtctacactgcgtttaaagccgcgctggccgatgctcgcgaacgcccggattatgacgtgccggttcatttgcgtaatgcgccgacgaaattaatgaaggaaatgggctacgggcaggaatatcgttacgctcatgatgaagcaaacgcttatgctgccggtgaggtttacttcccgccggaaatagcacaaacacgctattatttcccgacaaacaggggccttgaaggcaagattggcgaaaagctcgcctggctggctgaacaggatcaaaatagccccataaaacgctaccgttaatgttatcgttgcggtaatgttgttactgtatccctgtggtcgcaggctgtggccacatctcccatttaattcgataagcacaggataagcatgctcgatcccaatctgctgcgtaatgagccagacgcagtcgctgaaaaactggcacgccggggctttaagctggatgtagataagctgggcgctcttgaagagcgtcgtaaagtattgcaggtcaaaacggaaaacctgcaagcggagcgtaactcccgaagcaaatccattggccaggcgaaagcgcgcggggaagatatcgagcctttacgtctggaagtgaacaaactgggcgaagagctggatgcagcaaaagccgagctggatgctttacaggctgaaattcgcgatatcgcgctgaccatccctaacctgcctgcagatgaagtgccggtaggtaaagacgaaaatgacaacgttgaagtcagccgctggggtaccccgcgtgagtttgactttgaagttcgtgaccacgtgacgctgggtgaaatgcactctggcctcgactttgcagctgcagttaagctgactggttcccgctttgtggtaatgaaagggcagattgctcgcatgcaccgcgcactgagccagtttatgctggatctgcataccgaacagcatggctacagtgagaactatgttccgtacctggttaaccaggacacgctgtacggtacgggtcaactgccgaaatttgctggcgatctgttccatactcgtccgctggaagaagaagcagacaccagtaactatgcgctgatcccaacggcagaagttccgctgactaacctggtgcgcggtgaaatcatcgatgaagatgatctgccaattaagatgaccgcccacaccccatgcttccgttctgaagccggtagttatggtcgtgacacccgtggtctgatccgtatgcaccagttcgacaaagttgaaatggtgcagatcgtgcgcccagaagacagtatggcggcgctggaagagatgactggtcatgcagaaaaagtcctgcagttgctgggcctgccgtaccgtaaaatcatcctttgcactggcgacatgggctttggcgcttgcaaaacttacgacctggaagtatggatcccggcacagaacacctaccgtgagatctcttcctgctccaacgtttgggatttccaggcacgtcgtatgcaggcacgttgccgcagcaagagcgacaagaaaacccgtctggttcataccctgaacggttctggtctggctgttggtcgtacgctggttgcagtaatggaaaactatcagcaggctgatggtcgtattgaagtaccagaagttctgcgtccgtatatgaacggactggaatatattggctaatacccaatttttctgaatctaaaaagcgcctgcgggcgctttttttgtctccctttgataccgaacaataattactcctcacttacacgtaatactactttcgagtgaaaatctacctatctctttgattttcaaattattcgatgtatacaagcctatatagcgaactgctatagaaataattacacaatacggtttgttactggaatcaatcgtgagcaagcttgagtgagccattatgaaaacgaaaatccctgatgcggtattggctgctgaggtgagtcgccgtggtttggtaaaaacgacagcgatcggcggcctggcaatggccagcagcgcattaacattaccttttagtcggattgcgcacgctgtcgatagcgccattccaacaaaaagtgacgaaaaggttatctggagcgcctgtacagttaactgtggtagtcgctgcccgctacgtatgcacgtcgtggacggtgaaatcaaatatgtcgaaacggacaataccggcgatgacaattacgacggcctgcaccaggttcgcgcctgcctgcgtgggcgttccatgcgtcgccgtgtctacaatccggaccgcctgaaatatccgatgaaacgagtcggggcgcgcggtgaaggcaaattcgagcgcattagctgggaagaagcctacgacatcatcgcgaccaatatgcagcgcctgatcaaagagtacggcaacgagtctatctatctgaactatggcaccggtacgctgggcggcaccatgacccgctcctggccgccgggaaataccctggtcgcgcggctgatgaactgctgcggcggctatctgaaccattacggcgactactcctccgcgcaaattgcggaaggtttgaactatacctacggcggctgggcagatggcaacagcccgagcgatatcgaaaacagtaagctggtagtgctgtttggtaataaccctggcgaaacgcgaatgagtggcggtggggtgacttactatcttgaacaggcacgccagaaatctaatgcccgcatgatcatcatcgatccgcgctataccgacaccggtgccgggcgcgaagatgagtggatccctattcgtccgggaacagatgccgcactggttaacggtctggcgtacgtcatgatcactgaaaacctggtggatcaggcattcctcgataaatattgcgttggctacgatgagaaaaccctgccagccagtgcgccgaaaaatggccactataaagcttatattctgggtgaagggccagatggcgtggctaaaacgccggaatgggccagccaaatcactggtgttccggcagacaaaatcatcaaattggctcgtgaaatcggtagtaccaaaccggcgtttatcagccagggatggggcccgcagcgtcacgctaacggtgaaatcgcaacccgtgctatcagcatgctggcgattctgaccggtaacgttggtattaacggaggcaacagcggcgcgcgtgaaggtagttacagcttaccgtttgtccgtatgccgaccttggaaaacccgatccagaccagcattagcatgtttatgtggaccgatgccattgaacgtggcccggaaatgacggcgctgcgtgatggtgtacgcgggaaagataagctggatgtgccgatcaaaatgatctggaactatgccggtaactgcctgattaaccagcattctgaaatcaaccgtacccatgaaatccttcaggatgataagaagtgcgagctgattgtggttatcgactgccacatgaccagtagcgcgaaatatgctgacatcctgctgcctgactgcaccgcttccgaacagatggactttgcgctggatgcatcctgcgggaatatgtcttacgtgattttcaacgatcaggtgattaaaccgcgctttgaatgtaagaccatctatgaaatgaccagcgaactggcaaaacgtcttggcgttgagcaacagtttactgaaggccgtacccaggaagagtggatgcggcatctgtatgcccagagccgggaagcgattcctgaactgccaacgtttgaagagttccgcaagcaggggatctttaaaaagcgcgacccacaagggcatcacgttgcttataaagccttccgtgaagatccgcaggcaaacccactgactacgccaagcggcaaaattgagatttatagccaggcgctggctgacattgccgctacctgggaattgcctgaaggcgatgtgatcgatccactgccgatctacacgccgggctttgaaagttatcaggatccgctgaacaaacagtatccgctgcagcttacaggtttccactataaatctcgcgttcacagtacttacggcaacgttgatgtgctgaaagcggcttgccgtcaggaaatgtggatcaacccgcttgatgcccaaaaacgcggtatccacaacggcgataaagtcaggatctttaacgatcgtggtgaggttcatattgaggcgaaagtgacgccacgaatgatgccgggtgtggtcgcactgggtgaaggtgcctggtatgacccggatgcaaaacgtgtcgataagggtggttgtattaacgtactgaccactcaacgtccgtctcctctcgctaaggggaatccgagtcatacaaaccttgttcaggttgaaaaggtgtaaggagtaaccgatgacaacccagtatggattttttattgattccagccgttgcaccggttgcaaaacctgcgagctggcctgtaaagactacaaagatttgacgccagaagtcagcttccgccgcatttatgaatatgctggcggcgactggcaggaagataacggtgtctggcaccagaacgtgtttgcctactatctgagcattagttgtaaccactgcgaagatccggcttgtactaaagtctgcccgagcggtgcgatgcataaacgtgaagatggttttgttgtggtcgatgaagatgtgtgcattggctgccgctactgccatatggcttgcccgtatggcgcaccgcaatataacgaaacgaaaggccatatgaccaaatgcgatggttgttatgaccgtgttgcggagggtaaaaagccgatctgtgttgaatcttgtccgctgcgggcgctggatttcggccctatcgacgagctgcgtaaaaaacatggcgatctggcggccgttgcgccgttgccgcgagctcactttaccaaaccgaatattgtgatcaaacccaatgccaatagccgcccgaccggggataccactggctatctggcaaacccgaaggaggtgtgagatgggaagtggatggcatgaatggccgctgatgatcttcacggtcttcgggcaatgtgtagcaggtggttttatcgttctggctttggcgctgctcaaaggcgacctgcgagcagaagcccagcagcgtgttatcgcctgcatgtttggtttatgggtgctgatgggcattggctttatcgcctctatgctccatcttggtagtccaatgcgcgcttttaacagcctcaaccgggtaggggctagtgcactcagtaacgaaatcgccagcggtagcatcttttttgccgtaggcggcatcggctggttgctggcaatgctgaaaaagctgagtccggcattgcgtacgctgtggctgatagtgacgatggttcttggcgtcatctttgtctggatgatggtgcgtgtgtataacagcattgataccgttccgacctggtacagcatctggacgccgatgggcttcttcctgacgatgtttatgggcggcccgttactgggttacctgttgttgagtctggctggcgtcgatggctgggcgatgcgtctgctgccagcaatttctgtactggcactggtagtgagtggcgtggtgagtgtgatgcagggcgcagagctggcgactattcatagttctgtgcagcaggccgcagcgctggtgccggactatggtgcgctgatgtcctggcggatcgtgcttttggccgttgccctgtgcttgtggattgcaccacagctaaaaggttatcagcctgcggttccgctactttctgtaagtttcattctgcttctggcaggggaattaatcggtcgcggcgtattctatggtttgcatatgaccgtggggatggccgtcgcaagctaatcataacaaccggggtttcggccccggttctcttttatttctgcttcgttaacgtgtcataactggtcatcaaattacgataatcaggaatgtggttagagaacaacgtcgccagtccttcaatatcattacgccagtcgcgatgcagctcgcacgccacgccgaaccatgtcatcaattgcgcaccagcttggctcaagcgatcccatgcgctatgccgggtaatttcattaaaggtcccactcgcgtcagtcacgacaaagacgtcaaacccttcttcaatggcactaagcgccgggaatgccacgcaaacttcggttaccacaccggcaataattaactgttttttacctgtcgctttgacagcttttacaaaatcttcgttatcccaggcgttaatatttcccgggcgagcaatgtaaggtgtatcggggaattgtgctttcagttctggaactaatgggccgttaggaccggtttcaaaactggtggtaagaatagttggtaagttgaaatacttagccaggtcacccagcgccagcacgttatttttaaacttatcgggttcgatatcccgtacaagggaaagtaaaccagcctggtgatcaacaagcaaaacggcagcatcatttttatcaagacgaacatacggtttggtcatcctcttctcctttcgagagtcagtggtacgtctgaaatcgatcagacgcgatgcattgctctgaaagcatagacgggaaatatgagtttgctgtgaccatgaaatttttcgactgaacgaagcgtatgaaatttgtgttagttcaataaaaacaatcagatgagactaatcatctcttcagcattagcgttatgaatgagtaatataaatcgataataccgccgctgggatatcgcgtattttcacccattgacaatgtttttggcggtggcatgatgcgcatgaaatttgaacttcctcacggttttaattcatgtccacgtatacccagcctgtcatgcttttgctgtctggcctgcttttgttgactctggcgattgcggtgttaaatacactcgtgccgctttggctcgcccaggaacacatgtccacatggcaggtaggcgttgtcagcagttcctattttaccggcaaccttgtcggtacattgctgacagggtatgtcattaagcgcattggctttaaccgcagctattatctggcctccttcatttttgccgctggctgtgccggccttggcctgatgattggattctggagctggttggcttggcgttttgtcgcgggcgtcggctgtgccatgatttgggtggttgttgagagcgcgctgatgtgcagtgggacgagtcgtaaccgtgggcgtttgcttgctgcgtatatgatggtttattacgtgggaacgtttttaggccagttactggtcagcaaagttagtaccgagctgatgtccgtattgccgtgggttacaggtttgacgttggcagggatcttaccgctgttgtttacgcgtgtgctgaatcagcaggctgaaaaccatgatagcacgagtattacgagtatgctaaaactccgtcaggcgcggcttggcgtgaatggctgcattatcagtggaatcgttctgggatctctatatggcctgatgccgctgtacctcaatcacaaaggggtgagcaatgccagcattggtttctggatggcggtactggtcagtgcgggtatccttggacaatggccgattggacgtctggcggataagtttggtcgactgctggtgttgcgtgttcaggtctttgtcgtcattctcggcagtatcgcgatgcttagccaggcggcgatggccccagcgttattcatcctcggtgccgctggctttacgctatatccggtggcgatggcatgggcttgcgagaaagttgaacatcatcaactggtggcgatgaaccaggccttactgttgagctatactgtgggaagtctgcttggcccgagttttaccgctatgctaatgcagaatttctccgataatttattgtttatcatgatcgccagcgtaagctttatctatttgctgatgctgctgcgcaacgccggtcatacgccgaaacccgttgctcacgtgtaaatgaattcaagcagagtgtgaacttactgtttcacactctgcttttttgtttcttctatctgacttgctttattccaaattttattcgtttaaaaataaaatgtgcagcaggttataattttgcatttcgctatttccgcacttcttatttgccgcgcataatccctcgttttaccgatgcccctttaattttggcgaaggatttgtctatggctgggaatgttcaggaaaaacagttgcgatggtacaacattgcgctgatgtcttttatcactgtctggggttttggcaacgttgttaataactatgccaaccaggggctggtggttgtttttagttgggtgtttatctttgcactctatttcacaccttatgcgctaattgttggtcagttaggcagcaccttcaaagatgggaagggcggggtcagtacctggattaaacacacgatgggacccggactggcttatctcgccgcgtggacctactgggtggtgcatattccctatctggcacaaaaaccccaggcaattctgattgcgctcggttgggcgatgaaaggcgacggtagcctaatcaaagaatatagtgtcgtagcgttacaggggttaacgctggtgctgtttatcttctttatgtgggttgctagtcgcggtatgaaaagcctgaaaatcgtcggttctgtggcagggattgctatgtttgttatgagtctcctgtatgtggcgatggcggtaaccgcgcctgcaattactgaagtgcatattgcgaccacaaacattacctgggaaacgttcattcctcatatcgactttacctacattaccactattagtatgctggttttcgcggttggcggagcagagaagatttctccttacgttaatcaaacgcgcaacccaggaaaagaatttccaaaagggatgttatgcctggcggtgatggttgcggtttgtgccattctgggcagcctggcgatggggatgatgtttgatagccgtaatatcccggatgacttaatgaccaacggtcagtattacgcctttcagaagctgggcgagtattacaacatgggtaatactttaatggtgatttacgccattgcgaataccctgggacaagtagcggcgctggtattcagcattgatgccccgcttaaagtgctattaggtgatgctgacagcaaatatattccagccagtttatgtcgtaccaacgcttctggtacgcccgttaatggctattttctgaccctggtactggtggcgattctgattatgctgccgactctcggcattggtgatatgaacaatctctataaatggctgttgaaccttaatagcgtagtgatgccgctgcgttatttatgggtatttgttgcatttattgcagtcgttcgcttggcgcagaaatataaaccagaatatgtctttattcgtaataagcctctggcaatgaccgtcgggatttggtgttttgcctttaccgcctttgcctgtttgacggggatcttcccgaaaatggaagccttcactgcagagtggaccttccagttggcgctgaatgttgcaacgccgtttgtgctggtaggattaggactgatattcccgctgctggcgcgtaaagcgaatagtaaataattattgtggtcggtgacgctgactctggcagatctgacccgtttttacataatcgagaaatgcgcgcaagccgcaggacatatactggcggtttggataatagatctggaagcctggacgctctgtgctccagtcttccagtacacattctaaacgaccagtatcaaggtactccttgatctgttcatagagcagatacccgataccagcacccatcaaaacggcctccagttcagcatcaacatcatccagaatgatatttcctgcgacagcaatttccagctcctttgcaaattgccagtggaaaggtttgccgctgggataacgaaaaacaacacattgatgattaagcagatcatgaggatggcggggtttgccatatcttgcaaagtactctggcgttgctgctacacataatttcactggcgggccgatcgccacgctgatcatatctttttcgacgatgcaactaagtcgaacgccagcgtcaaagccctgttggacgatatcgacaagagagtcgtcagttgtgagctcgactttaatatcaggatattcacgtgtgaaaccaaccagtaaagacattaaaaatatacgtgcagctacccgggcggcattgattttgagcgttcctgtcggtgtcagacgaaaatcattcatctcatctaacatgatctgaatttcgtcgaaagctgggcgcaatcgttcatagagattagaacccgcttccgttaagcttacgcttcgggttgtccgattgaataagcgaattttaagacgttgttccagtgttttaatactatggctaatggcggagctggataagcctaactcatcgcccgctgcacgaaagctttgattacgggccacggcaaagaaagtggcaaagtcagacatattcatccgcattagtgaaaatccttcattaactcatcctgaatcatcacgtttacaggattatgccgcctgcgtaaagtgcgctccagaacttaacgtggaggtaaaattatgcagtctgaacgtatttatttggtatgggcccatcctcgtcatgatagtttgaccgcacatattgctgatgcgatccatcagcgggcaatggagcggaaaatacaggtgacggaactcgatttatatcggcgtaatttcaacccagtgatgacgccggaagatgaaccagactggaagaatatggataaacgttattctccagaggttcatcagctttatagtgagctgcttgaacatgacacgttagtggtggtttttcctctctggtggtacagcttcccggcaatgctaaaaggatatattgacagagtatggaataatgggctggcttatggagatgggcacaaattaccattcaataaagttcgttgggtggcgctggttggaggagacaaagaaagttttgtccagatgggctgggaaaaaaatataagcgattatttaaaaaatatgtgcagttatcttggtattgaagatgccgatgtcactttcttgtgtaatacagtggtattcgatggggaagaacttcacgcgagctattatcagagcttattatctcaggtacgggatatggtagatgcactataagatgtgttaaaaacgctgtagcagaatgaagcgcggaataaaaaagcggcaactcaataaagttgccgctttacggggaaattagaacattaccttatgaccgtactgctcaagaatgcctttcacgcgttccatggtctctttcttcggtggtttaacaccgtcgagtttgtactcttcacccattgccacccatttgtgtttgcccagctcgtggtaggggagaagctcgattttctcaacgttgcccatatcacgggtaaattcaccgaggcgatgcgcactatcgtcatcgtcagaccagcctgggacaacaacgtagcggatccacaccttcacatttttgttcgccagatatttagcgaactccagcgtgcggtggttggaaactccaaccagattttggtggatctcgtcgttcatctgtttgagatcgagcattaccaggtcggttacttccagcagttcatcaatcaccggatcgtaacgacgaacaaaaccgttggtgtccagacaggtatgaatgccttcttttttgcaggcgcggaaccagtcacgaacaaactcagcttgcaggattgcttcaccgccggatgcggtaacgccgccgccggaagcgttcataaagtggcgataggtcaccacttccttcatcaaatcttcaacggtaacttctttaccgccatgcgtgtcccaggtgtcgcggttatgacaatacaggcagcgcatcaggcagccctggaaaaaggtgataaagcgaatacctgggccgtctacggttccacaggattcaaaggagtgaatgcgaccaataacactcattgcggtgtttctccagatgtggcccatctgaggccgtgttggtgcgcagctcgaaggctacgtcgagtctgttttggcagtcaccttaaagtatagatagctgacaaaaaaggctctcgcgctaaaaaaggccccactttcgtggagcctttattgtacgctttttactgtacgatttcagtcaaatctaattacatagattgagtgaaggtacgagtaataacgtcctgctgctgttctttagtcaggctgttgaaacgtactgcgtagccagatacacggatggtcagctgcggatatttttccgggttttccatcgcgtcgagcagcatttcacggttcatcacgttaacgttcaggtgctgaccaccttcgatggatgcttcgtggtggaagtaaccatccatcagaccagccaggttggtcttacgaacttcgtcgtctttacccagtgcgttcggaacgatagagaaggtgtaggagataccatctttagcgtaagcaaacggcagtttagcaacggaagtcagagaggctactgcacctttctggtcacgaccgtgcatcgggttagcacccggtccgaacggcgcgccagcacgacgaccgtctggggtgttacccgttttcttaccatacacaacgttagaagtgatggtcagaacagactgagtcgggatagcgtcacggtaggtgtgcagtttctgaattttcttcatgaaacgttctaccaggtcaacagccaggtcatctacacgcggatcattgttaccaaactgcgggtattcgccttcgatttcgaagtcgatagccagaccgtcttcgtcacgaatcggtttaactttcgcatatttgattgcagacagggagtcagcagcaacggacagaccagcgataccacacgccatggtgcggataacgtcacggtcgtgcagcgccatcagagaggcttcgtagctgtacttgtcgtgcatgtagtggatgatgttcagtgcagtgatgtactgtttagccagccagtccatgaagtgatccatgcgctccatcacttcatcatagttcaggacatcgcctttgatcggttcagacttcggaccaacctgcattttcagtttttcgtcaacgccgccgttgattgcgtacagcatggttttcgccaggtttgcacgcgcaccgaagaactgcatttgtttaccaacgatcatcgggcttacgcagcaagcaatagcgtagtcatcgttgttgaagtccggacgcatcaggtcatcgttctcatactgcagagaagaggtgtcgatggacactttagcggcgaatttcttgaagttcagcggcagtttttcagaccacagaatggtcatgttcggttccggagacggacccatggtgtacagggtgttcaggaaacggaagctgtttttggtaaccagggtacgaccgtcgaggcccataccaccgatagattcggttgcccagatcgggtcgccagagaacagttcatcgtattccggagtacgcaggaagcgaaccatacgcagtttcatgaccaggtggtcaaccatttcctgcgcttcttgttcggtgatcttgccagctttcaggtcacgttcgatgtacacatccaggaaggtggaggtacgaccgaaggacattgcagcaccgttctgagacttaacagcagccaggtagccgaagtaagtccactggatagcttcctgagcgttggtagccggaccagagatgtcgtagccgtatttcgcagccatttctttcatctgacccagagcgcggtgctgttcagcgatttcttcgcgcagacggatagtctgttccaggtttacgccgttttccagatcagcctgcagagaagtgaactgtgccagtttgtctttcatcaggtagtcgataccgtacagcgcaacgcgacggtagtcaccgatgatacggccacggccatatgcatctggcagaccggtcagaacaccagatttacggcaacgcaggatgtccggagtgtaaacgtcgaacacgccctggttgtgagttttacggtattcagtgaagatttttttgatcatcggatccagttcgcggttgtacgctttgcaggaaccttcgatcattttgataccaccgaacgggataagagcacgtttcagcggagcttcagtctgcagaccaacgattttctcaagctgcttgttgatgtagccagcgtcgtgagaggtgatggtggaagcaacagcggtgtcaaagtcaactggcgcgtgagtgcggttttccagtttaacgccttccattactttgtcccacagggtggtggtcgcttcagtagcgccagccaggaaggactcgtcaccctcgtacggagtgtagtttttctgaatgaagtcacggacgtttacttcattctgccagtcacctttggtaaaaccttcccaggctgtggctaacttttcattaagctcggacatgtaacacctaccttcttaagtggattttttatttactgcgtacttcgacaaccattaatggtggtcgttttcacgcaggtaaatgacccagtatgtcaacccaaccaacaaaccaccaccgataatgttgccgatcgtaaccggaatcaggttatcagtgatgaaattcatcacggtcaggtgagaaaaattttccggtgcagaaccgactgcggtccaaaattccggggatgcgaagtcgcggattacaatacccatcgggatcataaacatgtttgcgatactgtgctcaaaaccgctggcaacaaacatcgcgaccggcagcaccataatgaacgctttgtccatcaggctgcggccagaataactcatccatactgccagacataccatcaggtttgccaggataccaagacagacggcctcaataaaagtatggtgcactttgtggtcggcggtttgtaggacgtttagtccccattgaccatttgcggtcatatactcgccggaaagccacattaaaagtacaaacagcagtgcgccgaccaggttgccaaaatagacatttagccagtttttcgccaactgaccccaggtgatgcgcccactcgccttagcaacaacaatcaacacggtggaagtaaagagatcggctccgcagacaacacaaagaatcagccccagagagaagcaaatgccgccaaccagttttgccatgccgaagggcattgtgcctgtgccagtggttgctgtgatatagaagacgaatgcgatactgatgaaaacaccggcggtaatcgccagatagaaagtcttaagcggatgtttcgttgctttatagacacccgcctcttcggccactttggccattgcagcaggaagtaaaagatcaaaagggttgtcagctttcacactaactctctctttattaagtcggcgacgagatactaacaaagcattatagatgagaaattgatatagatcatatctcgcctggcttataggcccgtaactcgcatggtttttatgcaaatacggagtaaatatttgattatccaaataaaaataaattttaaaaattaacaaatgagttgaattttttccgcatcctccgctaaaacagttaattaaaagggagcatcaggcgaataaagtaacaatatcgatcgtatttattaaatacaaattaccgatatttaaccttataattacaattattttattaatgcaaatatatgtaaagcggggcattaaaaaaacgccccgtaatataactcagactaatcattaagcctacattgcgtaggctatttgattttattttgcccagaatgctgctttggcgcgctgcagcttttcgtaggccttcaacaagctctgatgtgcagcaaacgcgtgcagatcgctatctaccggttgcaggccgtaaaacgccgcttcgccgctcattgccgcactggcggcttctacggcatctgcgccgtacatgcgaacaaacgcattcagatattgcagcggctggcgatcttcttcctgtgccagtaataacaacgtttgcaggcagcgataatagttggcgcgttccggactaaatacactactgttaaactccatcgtccattcggtccagaccagagcctgttccagatcgccaccagccagcgccagcatggcttttaattcaccgatacgcagggtgtaccaaccgttatcgctcccggtcgccagacccaacagctcacgcacgcgggtaaagtcatcaaaaccttcttcatccagttgctcgatgaggttcaggtaatcttctttttcccactcgctgcctggtaggctaagaatcgtttcacgtaaatggctgcccatactgttattcgcgagccacagatcttcagccggataaatatcggacatgccaggcacgataatacggcaagcataaacgcccagatgctcgtaatcggcaatataaacttctttatcttctttgttgaagatagccatcagtgtggcgaactcttcttccgtggtgccggagaaattccagtccacaaacggataatcggcatcctgcttgaacaggtcccaggagattaaaccgctggaatcgataaagtgcgtttcgaggttggtatgttcagcgacttcttcatcatcgaaggttggcggagtaaacacatccaaatctttcaggccacgaccttgcagcagctcggtcacggtacgttccagtgctacgccaaaatcaggatgcgcaccgaaagaggcaaagcaggtaccgttagcaggattgaacagtaccacgcaaatcaccggatactggccgccaaggctaccgtcataagcgaagattgggaaaccctccgcttccagcgtttcgatggcttcaactactgctgggtaacgcgccagcacgtctgccgggatctctggcaggctgatgctttcagcaataatgcggtttttcacgtagcgttcgaaaacttcagacaatccctgaacgcgtgcttcgttgcgggtattacctgcggacataccgttggagacgtacaggttaccaatgatattcatcggaatataaacggtctgattgtcggactgacgcgtaaacggcaggccgcaaataccacgatcttcgttaccggattgtaggtcaatcagcatgctgccggtcagttcattctccggatcataaaacgcgcgcagacggtcatcgagcagcccttctggcacatcgtcattttcggtcagtgggaaccatttttcgttgggataatgcacgaacggaccgttggcgatggtttcgcccagccagaagtccgcaaaaaagtagttggtactgagacgctcgaaatattcaccgagtgcagaagccagcgccgctttcttggttgcgcctttaccgttggtaaaacacagtgcgcactctttgtcgcgaatatgtacagaccagacgttaggcacgggattcagccaggaggcctcttcaatctgaaagccgaggtcactaagtttttgctggaagcgagcgatggaatcttccagagcggcatctttgccggggataaatgtttgcgtcatgaaaatcactttagtcgtacggaaagcgcgcaataatacgggttttatctcaaaggcgctatcaccgccgccatgccgatgaactgttgactatgcttttagcggataaaccacgttaagagcataaaaatgaaggcgttcgatctccaccgtatggcatttgataaagtgccttttgatttccttggcgaagttgcactacgtagtctttatacctttgtactggtctttttgttcctcaaaatgaccggaagacgcggtgtgcggcagatgagcctgtttgaagttttaatcattctgacgctgggaagtgcggcgggagatgtggcgttttatgatgatgtgccgatggtcccggtacttatcgtctttattactctggcgttgttataccgcctggtaatgtggttgatggcgcacagtgaaaaactggaagatcttctggaaggcaagccagttgtcattattgaagatggcgagctggcctggagcaaactcaataactccaacatgacggaatttgagttctttatggagctacgattgcgtggcgtggagcagctggggcaggtacgtctggcgattctcgaaaccaacgggcaaatcagtgtctatttctttgaagatgacaaggtgaaaccgggtttacttattttacccagtgattgtacgcagcgttacaaagtggtgccggagagcgcggactatgcctgtattcgttgtagtgaaatcattcatatgaaagcgggggaaaaacaattatgtccgcgctgtgcaaatccagaatggacgaaggcaagtcgggcaaaacgggtgacctgacagtaaaaacatcggctttttgctaataatccgagagattcttttgtgtgatgcaagccacatttttgccctcaacggttttactcattgcgatgtgtgtcactgaatgataaaaccgatagccacaggaataatgtattacctgtggtcgcaatcgattgaccgcgggttaatagcaacgcaacgtggtgaggggaaatggctcaaatcttcaattttagttctggtccggcaatgctaccggcagaggtgcttaaacaggctcaacaggaactgcgcgactggaacggtcttggtacgagcgtgatggaagtgagtcaccgtggcaaagagttcattcaggttgcagaggaagccgagaaggattttcgcgatcttcttaatgtcccctccaactacaaggtattattctgccatggcggtggtcgcggtcagtttgctgcggtaccgctgaatattctcggtgataaaaccaccgcagattatgttgatgccggttactgggcggcaagtgccattaaagaagcgaaaaaatactgcacgcctaatgtctttgacgccaaagtgactgttgatggtctgcgcgcggttaagccaatgcgtgaatggcaactctctgataatgctgcttatatgcattattgcccgaatgaaaccatcgatggtatcgccatcgacgaaacgccagacttcggcgcagatgtggtggtcgccgctgacttctctagtaccattctttcccgtccgattgacgtcagccgttatggtgtaatttacgctggcgcgcagaaaaatatcggcccggctggcctgacaatcgtcatcgttcgtgaagatttgctgggcaaagcgaatatcgcgtgtccgagcattctggattattccatcctcaacgataacggctccatgtttaacacgccgccgacatttgcctggtatctatctggtctggtctttaaatggctgaaagcgaacggcggtgtagctgaaatggataaaatcaatcagcaaaaagcagaactgctatatggggtgattgataacagcgatttctaccgcaatgacgtggcgaaagctaaccgtagccggatgaacgtgccgttccagttggcggacagtgcgcttgacaaattgttccttgaagagtcttttgctgctggccttcatgcactgaaaggtcaccgtgtggtcggcggaatgcgcgcttctatttataacgccatgccgctggaaggcgttaaagcgctgacagacttcatggttgagttcgaacgccgtcacggttaatgccgaaattttgcttaatccccacagccagcctgtggggtttttatttctgttgtagagagttgagttcatggaatccctgacgttacaacccatcgctcgtgtcgatggcactattaatctgcccggttccaagagcgtttctaaccgcgctttattgctggcggcattagcacacggcaaaacagtattaaccaatctgctggatagcgatgacgtgcgccatatgctgaatgcattaacagcgttaggggtaagctatacgcttagtgccgatcgtacgcgttgcgaaattatcggtaacggcggtccattacacgcagaaggtgccctggagttgttcctcggtaacgccggaacggcaatgcgtccgctggcggcagctctttgtctgggtagcaatgatattgtgctgaccggtgagccgcgtatgaaagaacgcccgattggtcatctggtggatgcgctgcgcctgggcggggcgaagatcacttacctggaacaagaaaattatccgccgttgcgtttacagggcggctttactggcggcaacgttgacgttgatggctccgtttccagccaattcctcaccgcactgttaatgactgcgcctcttgcgccggaagatacggtgattcgtattaaaggcgatctggtttctaaaccttatatcgacatcacactcaatctgatgaagacgtttggtgttgaaattgaaaatcagcactatcaacaatttgtcgtaaaaggcgggcagtcttatcagtctccgggtacttatttggtcgaaggcgatgcatctagcgcttcttactttctggcagcagcagcaatcaaaggcggcactgtaaaagtgaccggtattggacgtaacagtatgcagggtgatattcgctttgctgatgtgctggaaaaaatgggcgcgaccatttgctggggcgatgattatatttcctgcacgcgtggtgaactgaacgctattgatatggatatgaaccatattcctgatgcggcgatgaccattgccacggcggcgttatttgcaaaaggcaccaccacgctgcgcaatatctataactggcgtgttaaagagaccgatcgcctgtttgcgatggcaacagaactgcgtaaagtcggcgcggaagtggaagaggggcacgattacattcgtatcactcctccggaaaaactgaactttgccgagatcgcgacatacaatgatcaccggatggcgatgtgtttcagcctggtggcgttgagtgatacaccagtgacgattcttgatcccaaatgcacggccaaaacatttccggattatttcgagcagctggcgcggattagccaggcagcctgaatgaacaacgggcaataaatagccaaatctttctttatcaaaacgtcggcacattgtcggcgttttttttcggaccttgtgagtcattttgattaatggtagcgtcgcttgtcaatgtaagttgttgatacataatatttatatatgattaatcaacggatgattcacatgaagaatactaaattactgctggcgattgcgacctctgcagcattactgacagggtgtcaaaatacccacggtattgataccaatatggctatcagctccggtttaaatgcctataaagcagcaacattaagcgatgccgatgcaaaagcgattgccaatcagggctgtgccgaaatggacagcggcaatcaagtcgcaagtaaatccagcaagtacggtaaacgtctggcaaaaatcgccaaagcattgggtaacaatattaatggcacgccggtcaactataaggtttatatgaccagcgacgtcaacgcatgggcgatggcgaacggctgtgttcgtgtctacagtggcctgatggacatgatgaatgacaacgaaattgaaggcgttctgggccatgaactgggccacgtcgcgttgggtcacagcctggctgaaatgaaagcttcttatgcgatcgttgccgcacgcgatgccattagtgctaccagcggtgtggcttcccagctttcccgcagtcaattaggtgatatcgcagaaggcgctatcaatgctaaatactcccgtgataaagagtccgaagcagatgatttctcctttgatctgttgaagaaacgtggcatcagcacccaggggctggttggcagctttgaaacactggctagcctggatggcggtcgcacccagtccatgtttgactctcacccaccaagtacagagcgtgcgcaacacatccgtgatcgtatcgcctctggtaagtaaatcattgtcatctttcgggctggtcttctgccagcccgctataattgcgcaataaatccccatctgaatacagacaaaactggtttttgcacacaacgttaacgatttgtggcgtcggcgcgtataatgcgcgcggttatgttaacggtacgcctgttttaaggagataaagatgacggcaattgccccggttattaccattgatggcccaagcggtgcagggaaaggcaccttgtgtaaggctatggcggaagcgttgcaatggcatctgctggacagcggtgcaatttatcgcgtactggcattggcggcattacatcaccatgttgatgttgcgagcgaagatgcgctggtaccgctggcatcccatctggatgtacgttttgtgagcaccaatggcaatctggaagtgatcctcgaaggggaagatgtcagcggcgaaattcgtactcaggaagtggcgaatgcagctagtcaagtcgcggcattcccacgcgttcgtgaagcattattgcgtcgccaacgcgcgtttcgcgaattaccaggtctgattgccgatggccgcgacatgggaacggtggtattccctgatgcaccagtgaaaattttccttgacgcctccagcgaagaacgtgcgcatcgccgcatgctacagttgcaggagaagggctttagtgttaactttgagcgccttttggccgagatcaaagaacgcgacgaccgcgatcgtaaccgagcggtagcgccactggttccggcagccgatgctttagtgttggattccaccaccttaagcattgagcaagtgattgaaaaagcgctacaatacgcgcgccagaaattggctctcgcataagcgaccgaatttgcagtacccccgttgcaatggaatgacagcgggtatgttaaacaaccccatccggcatggagccaggtggacgttaaatataaacctgaagattaaacatgactgaatcttttgctcaactctttgaagagtccttaaaagaaatcgaaacccgcccgggttctatcgttcgtggcgttgttgttgctatcgacaaagacgtagtactggttgacgctggtctgaaatctgagtccgccatcccggctgagcagttcaaaaacgcccagggcgagctggaaatccaggtaggtgacgaagttgacgttgctctggacgcagtagaagacggcttcggtgaaactctgctgtcccgtgagaaagctaaacgtcacgaagcctggatcacgctggaaaaagcttacgaagatgctgaaactgttaccggtgttatcaacggcaaagttaagggcggcttcactgttgagctgaacggtattcgtgcgttcctgccaggttctctggtagacgttcgtccggtgcgtgacactctgcacctggaaggcaaagagcttgaatttaaagtaatcaagctggatcagaagcgcaacaacgttgttgtttctcgtcgtgccgttatcgaatccgaaaacagcgcagagcgcgatcagctgctggaaaacctgcaggaaggcatggaagttaaaggtatcgttaagaacctcactgactacggtgcattcgttgatctgggcggcgttgacggcctgctgcacatcactgacatggcctggaaacgcgttaagcatccgagcgaaatcgtcaacgtgggcgacgaaatcactgttaaagtgctgaagttcgaccgcgaacgtacccgtgtatccctgggcctgaaacagctgggcgaagatccgtgggtagctatcgctaaacgttatccggaaggtaccaaactgactggtcgcgtgaccaacctgaccgactacggctgcttcgttgaaatcgaagaaggcgttgaaggcctggtacacgtttccgaaatggactggaccaacaaaaacatccacccgtccaaagttgttaacgttggcgatgtagtggaagttatggttctggatatcgacgaagaacgtcgtcgtatctccctgggtctgaaacagtgcaaagctaacccgtggcagcagttcgcggaaacccacaacaagggcgaccgtgttgaaggtaaaatcaagtctatcactgacttcggtatcttcatcggcttggacggcggcatcgacggcctggttcacctgtctgacatctcctggaacgttgcaggcgaagaagcagttcgtgaatacaaaaaaggcgacgaaatcgctgcagttgttctgcaggttgacgcagaacgtgaacgtatctccctgggcgttaaacagctcgcagaagatccgttcaacaactgggttgctctgaacaagaaaggcgctatcgtaaccggtaaagtaactgcagttgacgctaaaggcgcaaccgtagaactggctgacggcgttgaaggttacctgcgtgcttctgaagcatcccgtgaccgcgttgaagacgctaccctggttctgagcgttggcgacgaagttgaagctaaattcaccggcgttgatcgtaaaaaccgcgcaatcagcctgtctgttcgtgcgaaagacgaagctgacgagaaagatgcaatcgcaactgttaacaaacaggaagatgcaaacttctccaacaacgcaatggctgaagctttcaaagcagctaaaggcgagtaattctctgactcttcgggatttttattccgaagtttgttgagtttacttgacagattgcaggtttcgtcctgtaatcaagcactaagggcggctacggccgcccttaatcaatgcagcaacagcagccgcttaatttgcctttaaggaaccggaggaatcatgaccaagagtgaattgatagaaagacttgccacccagcaaagccacattcccgccaagacggttgaagatgcagtaaaagagatgctggagcatatggccagcactcttgcgcagggcgagcgtattgaaatccgcggtttcggcagtttctctttgcactaccgcgcaccacgtaccggacgtaatccgaagactggcgataaagtagaactggaaggaaaatacgttcctcactttaaacttggtaaagaactgcgcgatcgcgccaatatttacggttaagttttttactcaaacttgaacgagagaaaagcacctgtcgggtgcttttttcatttctctaatctggaactggaagctgcctcgcagagttttgaacagttttcaccctttcgttaaattcttctgaatatgcctcggggaacgcaaaattcccaccagacaaccgctcaacaaagttgcacactttccataaacagggaggggtgcatgaaaataacgacagtcggtgtatgcataattagcggaatttttccgttgctgattttgccccaattgcctgggacattaacccttgcgtttctgactctcttcgcctgcgtactggcatttatccctgttaaaaccgtccgttatatcgcgctgacgttgctgtttttcgtttggggcatattaagtgcaaagcaaattttgtgggcaggagaaaccttaactggcgcgacgcaggatgcaattgttgagatcactgcaactgacggcatgaccactcattacggtcaaattactcatctacaaggtcgacgtatattccctgcgagtggtctcgtgatgtatggcgaatatcttccgcaagcggtttgtgctggacaacaatggagtatgaaactcaaagttcgtgcagttcatggccaacttaatgatggcggctttgatagccagcgttatgccattgcccagcatcagccgctcaccggccgttttctgcaggcaagtgtcattgaaccgaattgtagcctgcgtgcacagtatctggcgagtctacaaacaacgctgcaaccctatccgtggaatgcggttattcttggtttaggtatgggggaacggttatccgtccccaaagaaatcaaaaatatcatgcgcgatactggaacggcgcatttaatggcgataagcggattgcacatcgcttttgcggcgttgctggctgccggactcattcgcagtggacaaatttttctgcctgggcgctggatccactggcaaataccattaattggcggaatctgctgtgctgctttttatgcctggttgacgggaatgcaacctcctgcattgcgtaccatggtggcgcttgctacgtggggaatgcttaagttaagtgggcgacagtggagtggctgggatgtatggatatgttgtctggcggcaattttgctgatggatcctgttgccattctcagccaaagtttatggctctctgccgctgcggtcgcggcattgatattttggtatcagtggtttccctgtcctgagtggcaactgccgccggtattgcgtgcagttgtttccctcatccatctgcaactgggaatcacacttctgcttatgcccgtgcaaatcgtcatatttcatggcattagtctgaccagctttattgcaaatctattagcaattcccttggtgacatttatcacggttccgttgatcctcgccgcgatggttgtgcatttaagcgggccgttaatcctggagcaagggttatggtttcttgccgaccggtctttggctttacttttctgggggttaaagagtttgccggaagggtggatcaacattgctgaatgttggcaatggctaagtttttccccatggttcttactggtggtatggcgattaaacgcctggcgaacgttgccagcaatgtgtgtggctggaggcttgctgatgtgctggccgctgtggcaaaaacctcgacctgacgagtggcagctgtacatgcttgatgtcgggcaagggctggcaatggtgatagccagaaacggcaaagcgattctctatgacacaggactggcctggcctgaaggggatagtgggcaacaactgattatcccctggctccactggcataatcttgaaccggaaggcgttattctgagccatgaacatctggatcaccggggagggctggatagtatattgcatatatggccgatgttatggatcagaagtccgttaaactgggaacatcatcagccctgtgtgcgtggcgaagcgtggcaatggcaaggattgcgtttcagcgcgcactggcctttacaaggtagcaacgataaaggaaataaccattcctgtgtggttaaggttgatgacgggacgaatagcattcttctaaccggtgatattgaagccccagctgaacaaaagatgctaagccgttactggcagcaagtgcaggcaacattgcttcaggtacctcaccatggcagtaataccagtagtagcttgccattaattcagcgagtgaatggaaaagtggcactcgcaagcgcaagccgctataacgcatggcgactgccctctaacaaagttaagcatcgctatcaactgcaaggatatcaatggattgatactccacatcaaggtcaaacaacggtcaattttagtgcgcaaggctggcggattagcagcctcagggagcaaattttacctcgttggtatcatcagtggtttggcgtgccagtggataacgggtaaaatatgcggctatttcaacaaatgctggttttttgaatgcataacgacaaagatctctctacgtggcagacattccgccgactgtggccaaccattgcgcctttcaaagcgggtctgatcgtggcgggcgtagcgttaatcctcaacgcagccagcgataccttcatgttaagcctccttaagccacttcttgatgatggctttggtaaaacagatcgctccgtgctggtgtggatgccgctggtggtgatcgggctgatgattttacgtggtatcaccagctatgtctccagctactgtatctcctgggtaagtggaaaggtggtaatgaccatgcgtcgccgcctgtttggtcacatgatgggaatgccagttagtttctttgacaaacagagtacgggtacgctgttgagtcgtattacctacgattccgaacaggttgcttcttcttcttccggcgcactgattactgttgtgcgtgaaggtgcgagcatcatcggcctgttcatcatgatgttctattacagttggcaactgagcatcattttgattgtgctggcaccgattgttagcattgcgattcgcgttgtaagcaagcgttttcgcaacatcagtaaaaacatgcagaacaccatggggcaggtgaccaccagcgcagaacaaatgctgaagggccacaaagaagtattgattttcggtggtcaggaagtggaaacgaaacgctttgataaagtcagcaaccgaatgcgtcttcaggggatgaaaatggttagtgcctcttccatctctgatccgatcattcagctgatcgcctctttggcgctggcgtttgttctgtatgcggcgagcttcccaagtgtcatggatagcctgactgccggtacgattaccgttgttttctctagtatgattgcactgatgcgtccgctgaaaagcctgaccaacgttaacgcccagttccagcgcggtatggcggcttgtcagacgctgtttaccattctggacagtgagcaggagaaagatgaaggtaagcgcgtgatcgagcgtgcgactggcgacgtggaattccgcaatgtcacctttacttatccgggacgtgacgtacctgcattgcgtaacatcaacctgaaaattccggcagggaagacggttgctctggttggacgctctggtagcggtaaaagtaccatcgccagcctgatcacgcgtttttacgatattgatgaaggcgaaatcctgatggatggtcacgatctgcgcgagtataccctggcgagcttacgtaaccaggttgctctggtgagccagaatgtccatctgtttaacgatacggttgctaacaacattgcttacgcacggactgaacagtacagccgtgagcaaattgaagaagcggcgcgtatggcctacgccatggacttcatcaataagatggataacggtctcgatacagtgattggtgaaaacggcgtgctgctctctggcggtcagcgtcagcgtattgctatcgctcgagccttgttgcgtgatagcccgattctgattctggacgaagctaccagcgctctggataccgaatccgaacgtgcgattcaggcggcactggatgagttgcagaaaaaccgtacctctctggtgattgcccaccgcttgtctaccattgaaaaggcagacgaaatcgtggtcgtcgaggatggtgtcattgtggaacgcggtacgcataacgatttgcttgagcaccgcggcgtttacgcgcaacttcacaaaatgcagtttggccaatgatcgaaaaaatctggtctggtgaatcccctttgtggcggctattgctgccactctcctggttgtatggcctggtgagtggcgcgatccgtctttgctataaactaaaactgaagcgcgcctggcgtgcccccgtaccggttgtcgtggttggtaatctcaccgcaggcggcaacggaaaaaccccggtcgttgtctggctggtggaacagttgcaacagcgcggtattcgcgtgggggtcgtaagccggggatatggtggtaaggctgaatcttatccgctgttattgagcgcagataccacaacagcacaggcgggtgatgaacctgtgttgatttatcaacgcactgatgcgcctgttgcggtttctcccgttcgttctgatgcggtaaaagccattctggcgcaacaccctgatgtgcagatcatcgtaaccgacgacggtttacagcattaccgtctggcgcgtgatgtggaaattgtcgttattgatggtgtgcgtcgctttggcaatggctggtggttgccggcggggccaatgcgtgagcgagcggggcgcttaaagagcgttgatgcggtaatcgtcaacggcggtgtccctcgcagcggtgaaatccccatgcatctgctgccgggtcaggcggtgaatttacgtaccggtacgcgttgtgacgttgctcagcttgaacatgtagtggcgatggcggggattgggcatccgccgcgcttttttgccacgctgaagatgtgtggcgtacaaccggaaaaatgtgtaccgctggccgatcatcagtctttgaaccatgcggatgtcagtgcgttggtaagcgccgggcaaacgctggtaatgactgaaaaagatgcggtgaaatgccgggcctttgcagaagaaaattggtggtatttgcctgtagacgcacagcttagtggtgatgaaccagcgaaactgcttacgcaactaaccttgctggcttctggcaactaattacgccgcggcagcgttcgattgatggagtcatgaatgagcctgccgcacctctcccttgctgatgcgcgtaatcttcaccttgccgcacaaggcctgttaaacaaaccccgccgtcgagcgagcttggaggatattccggcaacgatctcccgcatgtccttgctgcaaatcgataccatcaatattgttgcccgtagtccatatctggtgcttttcagtcgtctgggaaattatcctgcccagtggctggatgagtctctggcgcgtggcgaattaatggaatactgggcgcatgaagcctgctttatgccgcgtagcgactttcgtcttattcgccaccgcatgctggcacctgaaaaaatgggctggaaatacaaagacgcctggatgcaggaacatgaggcggaaattgcacagttaattcagcatattcatgataaggggccggtacgtagtgccgattttgagcatcctcgtaaaggtgcaagcggctggtgggaatggaagccgcataaacggcatctggaaggtttatttactgccggaaaggtgatggtgattgaacggcgcaacttccagcgcgtttatgatttaacccaccgtgtcatgcctgactgggatgatgagcgcgatctcgttagccaaacagaagcagaaatcatcatgctggataacagtgcgcgtagcctgggaatattccgcgaacagtggctggcagattactatcggctgaaacgtccggcactggcggcgtggcgcgaagcgagggctgaacagcagcaaatcattgctgtgcatgttgaaaaattgggcaatctttggctgcatgatgatttgctgccgctactcgagcgagcgctggccggaaagctcactgcaacgcacagcgcggtacttagcccttttgatcctgttgtctgggatcgcaaacgcgcagagcagctttttgattttagctaccggctggagtgctataccccagcgccgaaacgccagtatggctattttgttctgccgttattacatcgtgggcaattagttgggcgaatggatgccaaaatgcatcgccagacaggcatccttgaagttatctctctgtggttacaggaaggtattaaaccaacgacaacgctgcaaaaagggctacgtcaggcgattactgatttcgctaactggcagcaggcaacgcgggtgacattaggatgctgcccgcaaggcctctttactgattgccgcaccggctgggaaatagaccccgtcgcataaatgattatgataagatttatgcattcataacccgatccatctggaggaactatggatcatcgtctgcttgaaatcattgcctgcccggtttgcaacggaaaactttggtataaccaggaaaaacaagagcttatttgcaaactggacaacctcgctttcccgctgcgtgatggcattccagtgttgctggaaacggaagcccgcgtgctgactgctgatgagagtaaaagttgatgtaaactgctgatgagagtaaatcatgagttttgtggtcattattcccgcgcgctacgcgtccacgcgtctgcccggtaaaccattggttgatattaacggcaaacccatgattgttcatgttcttgaacgcgcgcgtgaaagtggtgccgagcgcatcatcgtggcaaccgatcatgaggatgttgcccgcgccgttgaagccgctggcggtgaagtatgtatgacgcgcgccgatcatcagagtggaacagaacgtctggcggaagttgtcgaaaaatgcgcattcagcgacgacacggtgatcgttaatgtgcagggtgatgaaccgatgatccctgcgacaatcattcgtcaggttgctgataacctcgctcagcgtcaggtgggtatggcgactctggcggtgccaatccacaatgcggaagaagcgtttaacccgaatgcggtgaaagtggttctcgacgctgaagggtatgcactgtacttctctcgcgccaccattccttgggatcgtgatcgttttgcagaaggccttgaaaccgttggcgataacttcctgcgtcatcttggtatttatggctaccgtgcaggctttatccgtcgttacgtcaactggcagccaagtccgttagaacacatcgaaatgttagagcagcttcgtgttctgtggtacggcgaaaaaatccatgttgctgttgctcaggaagttcctggcacaggtgtggatacccctgaagatcttgagcgcgttcgcgctgaaatgcgctaatttcacttcacgacacttcagccaattttgggaggagtgtcgtaccgttacgattttcctcaatttttcttttcaacaattgatctcattcaggtgacatcttttatattggcgctcattatgaaagcagtagcttttatgagggtaatctgaatggaacagctgcgtgccgaattaagccatttactgggcgaaaaactcagtcgtattgagtgcgtcaatgaaaaagcggatacggcgttgtgggctttgtatgacagccagggaaacccaatgccgttaatggcaagaagctttagtacgcccggaaaagcccgacaactggcatggaaaaccaccatgctggcaagaagtgggactgtccgtatgccgactatttatggtgtgatgacgcatgaagaacaccccggccccgatgtcctgctactggagcggatgcgtggtgttagcgtggaggcaccagcccgaacaccagaacgctgggaacaactcaaagaccaaatcgttgaagccttactggcctggcaccgtcaggacagtcgcggttgcgtcggcgcggtcgacaatactcaggaaaatttctggcccagttggtaccggcaacatgttgaagtgctatggaccacgctcaatcagttcaataacaccggtctgacgatgcaggataagcggatcctgtttcgcactcgcgaatgtctcccggcattatttgaaggctttaacgacaattgtgtgctgattcacggtaacttctgtttacgcagcatgttgaaagatagccgcagcgatcagttactggcgatggtcgggccgggactaatgctttgggcaccgcgagaatacgaactgttccgactaatggataattctctggcggaagatttgctctggagttacctgcaacgcgcgccagtggcggagagcttcatctggcggcgttggttgtatgtgttatgggatgaagttgcgcaactggttaataccggacgatttagtcggcgcaacttcgatctggcaagtaaaagtctcttgccgtggctcgcctgatcactcttgccgtggctcgccactgctaccttttagccactgccagatacggccaagcgtttcatagccaacacgatcgctatgcatcaaccagaccggagaagggattgcccgttcccacgggttaagcgggctgtcgatggccaactgattcgccggggctggtagcggatttaacccttcctgctgaaaaaagatcatcgcccgcggcagatgacttgcggaggtcaccagcaggaaaggggcgtcaccaatcgcctgtttcactgctgcagcttcttcttcggtatcttttggcaaatccagggtgataatttgctcgcgcggcacgcccaggctttgcgcaactctggcacctacttccgctgtactcaccgtattggtttttgctacgcctcccgtgaagatcagtttacttcccggattttcgcgccataagcgaataccttcattcaggcgtggcagactgttattgattaaattagagctcggtgcccactgcgggttccaggtataaccacctccgagcaccacgatatagtccactttttggctattattccatgtcggataggtgctttcgatgggacgcagcaggcggtcggctaccggttgcaaactcaataacaagagcgccagccacccaatgctaataaaaatcttcccggttttttgaaaacggctaaaccacagcagcgccaggccagcgccaataatcaacaacatcagcggaagtggcagcaacatattgccaatcacttttttcagtgtaaaaagcatcctttctggttccttttttaaccatatagcaagggatcgccagcgatattacaccagacgggttcattctcgccgtggctgtgacaaaatagcgtctttatcagaaaacgtcttagccaaccggtggagaaagcaatgcaggatcgcaattttgatgatattgcggaaaagttttcccgtaacatttacggcaccaccaaagggcagcttcgacaggctattctgtggcaggatctcgatcgcgtgctggcggaaatgggcccgcaaaaactgcgtgtgctggatgctggcggtggagaagggcagaccgcaatcaaaatggccgagcgtgggcatcaggtcattttatgcgatctttctgcgcagatgatcgaccgcgcaaaacaggcggcagaagcaaaaggtgtgagcgacaacatgcaatttatacattgcgccgctcaggatgttgctagccatttggaaacgcccgttgatctgatattgttccatgcggtgctcgagtgggtggctgatccccgcagcgtattgcagaccctctggagtgtgttgcgtccaggcggcgtgttgagcttaatgttctacaatgcgcatggtttgttgatgcataacatggtcgccgggaattttgattacgtgcaggcgggaatgccgaaaaagaaaaaacggacgcttagcccagattatccacgcgacccggcgcaggtttatctgtggctggaagaagctggttggcaaattatgggtaagacaggcgttcgcgtgtttcatgattatctgcgcgagaaacaccagcagcgcgactgctatgaagcattacttgaattagaaacgcgttattgccgtcaggaaccgtatattaccctggggcgttatattcatgtcaccgcgcgcaaaccgcagagcaaggataaagtatgagtgaattttcccagacagtccccgaactggttgcctgggccagaaaaaatgacttctccatcagcctgccggtagaccgactctcttttctgctggcggttgccacgctgaacggcgagcgtctggatggtgagatgagtgaaggcgagctggtggatgcattccgccatgtgagtgatgcgtttgagcaaaccagcgaaaccatcggcgtgcgcgccaataacgcgatcaacgacatggtgcgtcaacgtctgctgaaccgctttaccagcgagcaggcggaagggaacgcaatttaccgtctgacgccgctcggcatcggcattactgactactacatccgtcagcgcgagttttctacgctgcgtctttctatgcagttgagcattgtggcgggtgagctcaaacgcgcagcagatgccgccgaagagggcggtgatgaatttcactggcaccgtaatgtctatgcgccactgaaatatagcgtagcagaaattttcgacagtatcgacctgacgcaacgtctgatggacgaacagcagcagcaggtgaaggacgatatcgcccagttgctgaacaaagactggcgggcggcgatttccagctgtgaattgttgcttagcgaaacttccggaacgctgcgtgaattgcaggatacgctggaagcggcaggcgacaaattgcaggctaatctgttgcgcattcaggatgcgacgatgacccatgacgatctgcatttcgtcgatcgtctggtgttcgatctgcagagcaaactcgatcgtattatcagttggggccagcaatccatcgacttgtggattggctacgaccgccacgtacacaaatttattcgtaccgcgatcgatatggataaaaaccgcgtctttgctcagcggttacgtcagagcgtacaaacctattttgatgagccgtgggcgctaacttatgccaatgccgatcgtctgctggatatgcgtgacgaagagatggcactgcgcgatgaagaagtgactggggaacttcctgaggatctggaatacgaagagtttaacgagatccgcgaacagctggcggcgatcatcgaagaacaacttgccgtgtacaaaaccagacaagtgccgctggatcttggtctggtggtacgcgaatatctgagtcagtatccgcgtgcacgtcactttgacgttgcgcgtattgttattgatcaggcggtacgtcttggcgtagcgcaagcagatttcaccggactgccagcgaaatggcagccgattaatgattacggagccaaggtacaggcgcatgtcatcgacaaatattgaacaagtgatgccggttaagctggcgcaggcgctggcgaatccgttatttccggcgctggacagcgccttacgtagtggacgccatattggcctcgacgaactggataatcatgcattcctgatggattttcaggaatatctggaagagttttacgcgcgttataacgttgagcttattcgcgcaccagaagggttcttctatttacgcccacgttccaccacgctgatccctcgttccgtcttgagcgaactggatatgatggtcgggaaaatcctctgttatctctatctcagcccggaacggctggcgaatgaggggattttcacccagcaggaactgtacgacgaactgctcaccctggccgatgaagcaaaactgctgaaactggtgaacaaccgtagtaccggtagtgacgttgaccgtcagaagttgcaggagaaagtacgttctagcctcaaccgtctgcgtcgtttaggcatggtgtggtttatgggccacgacagcagcaagtttcgcattaccgaaagcgtgttccgcttcggagccgatgtgcgtgctggcgacgatccccgtgaagcacagcgtcgcctgattcgtgatggcgaagcaatgccgattgaaaatcatctgcaactcaacgatgaaaccgaagagaatcagccagatagcggagaggaagaataatgattgaacgcggtaaatttcgcagtctgacgctgattaactggaacggcttttttgcccgaacttttgaccttgacgagctggtcacgacgctttctggcggtaacggggcgggtaaatccaccaccatggcggcgttcgttacggcgctgatccccgacctgaccctgctgcatttccgtaacactacggaagccggggccaccagcggtagccgcgataaaggtctgcacggtaagctgaaagcgggtgtctgttatagcatgctcgacaccattaacagccgccaccagcgcgtggtggtcggtgtgcgtctgcaacaggttgccggacgcgatcgtaaagtggatatcaagccgtttgccattcagggactgccgatgagcgtgcagccgacacagctggtgaccgaaaccctgaacgaacgccaggcgcgcgtgctgccgcttaacgagctgaaagacaagctcgaggcgatggaaggcgtgcagtttaaacagttcaactccattactgattaccacagcctgatgttcgatctgggcatcatcgcgcgtcgtctgcgctccgcatctgaccgtagcaaattctatcgtctgatcgaagctagcctgtatggcgggatctccagtgccattacccgttctctgcgcgactacctgttgccagaaaacagcggcgtgcgtaaagcgttccaggacatggaagcggcgctgcgtgaaaaccgtatgacgctggaagcgattcgtgtcacccagagcgaccgcgacctgtttaagcatctgatcagcgaagccaccaactacgtggcggcggactacatgcgtcacgccaacgagcgccgtgtccatctcgacaaagccctggagtttcgtcgcgagctacatactagccgtcagcaactggcggctgagcagtacaaacacgtcgatatggcgcgtgagctggcagagcacaacggtgccgaaggcgatctggaagcggattatcaggcggccagtgatcacctgaacctggtgcaaaccgcactgcgtcagcaggagaagatcgaacgctacgaagcggatctcgatgagctgcagatccgtctggaagagcaaaatgaagtggtggcagaagccatcgaacgccagcaagagaatgaggctcgtgcggaagctgccgaactggaagtggacgagctgaaaagccagcttgctgactaccagcaggcgctggacgtccagcaaacgcgcgcgatccagtataaccaggcgattgctgcgcttaatcgtgccaaagaactgtgccatctgccggacttaaccgccgactgcgccgccgaatggctggaaaccttccaggcgaaagagctggaagcgactgaaaaaatgctctctcttgagcagaaaatgagcatggcgcaaaccgcgcacagccagtttgagcaggcttatcagctggtggtggcaatcaacggcccactggcgcgtaacgaggcgtgggatgtcgctcgcgaactattgcgcgaaggggtcgatcagcgtcacctggcagagcaggttcagccgctgcggatgcgattaagcgaactggaacagcgtctacgcgagcagcaagaagctgagcgtctgctggcagatttctgcaaacgtcagggcaagaattttgatatcgacgaactggaagccctgcatcaggaactggaagcacgcattgcctctctttccgatagcgtgtctaacgcccgtgaagagcgcatggcactgcgccaggagcaggaacagctgcagtctcgcattcagagtttgatgcagcgtgcgccggtttggctggcagcgcaaaacagtctcaaccagttgagcgaacagtgcggcgaagagtttacctccagccaggacgtcaccgaatatctgcaacagttgctggagcgtgagcgagaggcgattgttgaacgcgatgaagtgggcgcgcgcaaaaacgccgtcgatgaagagatcgaacgtttaagccagcctggcggctctgaagatcagcgtctgaacgcgctggcggagcgttttggtggtgtgctgctgagtgaaatttatgacgacgttagcctggaagatgcgccgtacttcagtgcgctgtatggcccgagtcgccacgccatcgtggtgccagatctgagtcaggtaactgaacacctggaaggcttgaccgattgcccggaagatctctatctgatcgaaggagatccgcagagtttcgatgacagcgtgttcagcgttgatgagctggaaaaagcggtagtggtgaaaatcgccgatcgtcagtggcgttatagtcgtttcccggaagtgccgctgtttggtcgtgctgcgcgtgaaagccgtattgaaagcctccatgccgagcgtgaagtgctttccgaacgcttcgccacgctctcctttgatgtacagaaaactcagcgtctgcatcaggcgttcagccgctttatcggcagtcatctggcggttgcgtttgagtctgacccggaagcagaaatccgtcaactgaacagccgtcgcgtcgaactggagcgggcgttaagtaatcatgaaaatgataaccagcagcagcgtattcagtttgagcaggcgaaagagggcgttacggcgctgaaccgcattctgccgcgtctcaacctgttggctgatgacagcctggcggatcgcgtcgatgaaatccgcgaacgtctggatgaagcccaggaagccgcgcgttttgttcagcagtttggcaatcaactggcgaaactggaaccgattgttagcgtattgcagagcgacccggaacagttcgaacagttaaaagaagattacgcgtactctcagcagatgcagcgcgatgcccgtcagcaggcgtttgccctgacggaagtggtgcagcgtcgtgcgcactttagctattctgacagcgcagaaatgcttagcggtaacagcgatctcaacgaaaaactgcgtgaacgtctggaacaggcggaagcggagcgtacccgcgctcgcgaagcgttgcgcggtcacgcagcgcagttgagtcagtacaaccaggtgctggctagcctgaaaagttcttacgacaccaaaaaagagctactcaacgatctgcaacgtgaattgcaggatatcggcgtgcgtgctgatagcggggcagaagagcgggcgcgtattcgccgtgacgagctgcatgcgcaactgagcaataaccgtagtcgccgcaatcaactggaaaaagcgcttaccttctgcgaagcggagatggacaacctgacccgcaaactgcgcaagctggagcgggattactttgagatgcgcgagcaggtagtgaccgccaaagcgggctggtgtgcggtgatgcgcatggtgaaagataacggcgttgagcgccgcttacaccgtcgtgagctggcttatctctccgctgatgatttgcgttccatgagcgataaggcgttaggtgcgctgcgtctggcggtggcggataacgaacatctgcgcgacgtgctgcgcatgagcgaagatccgaaacgtccggagcgtaaaattcagttcttcgtggcggtttatcagcatctgcgtgaacgtattcgtcaggatattattcgtaccgatgatccggtggaagctatcgaacagatggagattgaacttagccgtctgaccgaagaattaacctcccgtgaacagaaactggcgatcagttcccgcagcgtggcgaacatcattcgcaaaaccattcagcgcgagcagaaccgtatccgtatgctcaaccaggggttgcagaacgtaagctttggtcaggtgaacagcgtgcgtctcaacgtgaacgtgcgtgaaacgcacgccatgctactggatgtgctctctgaacagcacgagcagcatcaggatctgtttaacagcaaccgtttgaccttcagcgaagcgctggcgaaactgtatcaacgtcttaacccgcagattgatatggggcagcgcacgccgcagaccatcggtgaagaactgctggattaccgcaactatctggaaatggaagttgaggttaaccgtggttccgatggctggctgcgcgcagagtctggtgcattgagcaccggtgaggcgattggtaccggtatgagcattctggtgatggtggtacaaagctgggaagatgaatctcgccgcctgcgcggtaaagatatctctccttgccgcctgctgttcctcgatgaagcagcgcgactggatgctcgttctatcgccacgctgtttgaattgtgtgagcgtttgcaaatgcaactcatcatcgcagcgccggaaaatatcagcccggagaaaggcaccacctataaactggtgcgtaaagtcttccagaataccgaacacgttcatgtcgtcggcctgcgaggatttgcgccgcaactccctgaaacgcttccaggaactgacgaagcgccttctcaggcgagttaaaattaaggcggcagcaatgccgccttttctttttccgaaaactccgtttctgcactaaaaaagtggcacattacggcgcgcttttctttaaacttctttacattaggttatgtaaaaacgtatcggcgtttatatactgaagataagcctgatgagtaacaggcttgctcgtcatactttcgtgagtattggcgttgtacaggcaagtcgtaaaataacagcctggctattcagagtatgataaaaacagggggcaagggatgttgcttaatatgatgtgtggtcgtcagctgagcgcaatcagtttgtgcctggccgtaacattcgctccactgttcaatgcgcaggccgatgagcctgaagtaatccctggcgacagcccggtggctgtcagtgaacagggcgaggcactgccgcaggcgcaagccacggcaataatggcggggatccagccattgcctgaaggtgcggcagaaaaagcccgcacgcaaatcgaatctcaattacccgcaggttacaagccggtttatcttaaccagcttcaactgttgtatgccgcacgcgatatgcaacccatgtgggaaaaccgtgatgctgttaaagccttccagcaacagctggcagaggtggcgattgccggtttccagccgcagtttaataaatgggtagagttactgaccgatcctggtgttaacgggatggcacgcgacgtggtgctctctgatgcgatgatgggctatctccatttcattgcaaatattccggtcaaaggcactcgctggctatatagcagtaaaccttatgcacttgcaacgccgccgctcagcgtgattaaccaatggcagctggcgctggataaaggtcaattgcctacgtttgttgcaggactggcaccgcagcatccgcaatatgcggcgatgcatgaaagcttactggccttactctgtgacaccaaaccgtggccccaactgaccggcaaagcaacgttgcgcccagggcagtggagtaacgacgtaccggcgttgcgcgaaatattgcaacgcacaggcatgttggacggggggccgaaaattactctacctggcgatgacacgccaactgacgcggtagtcagcccatccgctgttactgttgaaacagcagaaactaagccgatggataagcaaacgacgtctcgtagtaaacctgcgcctgccgttcgcgccgcctacgataatgaactggtggaagccgttaaacgttttcaggcatggcaaggattgggggcagatggtgctattggcccggcaacacgtgactggttaaacgtaacgcccgcccagcgtgctggtgtgttggctctcaacatccagcgattgcgcttgctgccaacagagctttctaccgggatcatggttaacattccggcctatagcctggtctactatcagaacggcaatcaggtgctggatagccgagtcattgtcggtcgccccgatcgcaaaacgccgatgatgagcagtgcccttaacaacgtagtggtaaacccgccgtggaacgtacctccaactctggcacgcaaagatattctgccaaaagtgcgcaacgatccgggatatctcgaaagccatggctatacggtgatgcgcggctggaacagcagagaagcgattgacccatggcaggttgactggtctacaatcacggccagcaatttaccgttccgcttccagcaggctccaggcccacggaacagcctggggcgctataaattcaatatgccgagtagtgaggccatttatttgcatgacacgccgaaccacaatctgttcaagcgtgatacacgcgcattgagcagtggctgtgtacgagtgaataaagcttccgatctggcgaatatgctgttgcaggatgcaggctggaatgacaaacgtatttctgatgcgctgaagcagggtgatacacgttacgtcaatattcggcagagcattccggtgaatctctactacctgacggcctttgttggtgcagatggtcgtacccagtatcgtacagatatttacaattatgatctgcctgcgcgatccagcagccaaatcgtaagcaaagcggaacaattaatcaggtaaatgaagtagttcggggaaatcagttgtcgtaataattagcatgattgggggcgattctctgcagcccccgtcactgctggggttgagtcatcttgacgtctgctttacgggcggttaaggtgcctcttgtgcgccagaagtgcatataaacgataacattgacctgtagacttgattatcatggacaaattcgacgctaatcgccgcaaattgctggcgcttggtggcgttgcactcggtgccgccatcctgccgacccctgcgtttgcaacactctctaccccacgcccgcgcattttgacactcaataatcttcataccggagagagtatcaaagcggagtttttcgatggcagaggctatattcaggaagaattggcaaaacttaaccattttttccgcgattaccgcgcgaacaaaataaagtccatcgacccaggattattcgaccagttgtatcgcctgcaagggttgttaggcacgcgcaaaccggtgcaactcatttccggttatcgttctattgataccaacaatgaactacgcgcccgcagccgtggagtagcgaagaaaagctatcacactaaaggccaggcgatggatttccatattgaaggtatcgcgttaagcaatattcgcaaagccgcgttatctatgcgcgcaggtggtgtaggatattatccacgtagtaactttgtgcatattgataccgggccagcacggcactggtaataattgcttaacgaaacaggggcagtatgaactatcgtattattccggtcaccgcattctcccagaactgtagtttaatctggtgtgaacaaacccgtctggccgcactggtcgatcctggcggcgatgcggaaaaaatcaaacaggaagttgatgacagcggcctgacactgatgcagatcctgctgacgcatggtcatctggaccacgttggcgcagcggcggaactggcgcaacattacggcgtgccggttttcggcccggaaaaagaagatgagttctggctgcaaggcttgcctgcgcaaagtcgtatgtttggtctggaagagtgccagccgctgacgccagatcgttggctgaacgaaggcgataccatcagcatagggaatgtgactttacaggtgttacattgccctgggcatacgccgggtcatgtcgtgttttttgatgatcgggcaaagctgctgatttctggcgatgttattttcaaaggcggagtagggcgcagtgacttcccgcgtggcgatcataatcaactgatttctagtatcaaagataaattgctgccactgggggatgacgtgatatttattccgggtcacggaccattatccacacttggttatgaacgcctgcataatcccttcctgcaagacgaaatgcccgtctggtaaggcacataaaaaagcccgcttttaatgctggcctggatttctggcaaagtgcgctttgtttatgccggatgcggcacgagcgccttatccggcctacaaaatcgtgcaaattcaaaatattgcaggggacgcgtaggcctgataagcgtagcgcatcaggcaatgttgcgtttgtcatcagtctcagcccgcttttcagcgggcttcattgtttttaatgcttacagcactgccacaatcgcttcgcacagcggagccatgttatctggtgtcatcccggccacatttacgcgaccagaagcaaccgcatatacgccaaactcttcgcgcagacgcagcacttgttcttttgtcaggccactgaaggagaacatgccgttctgtttgatgataaagctgaagtcgcggtttgcgcctttttcctgcagcgtattgacgaacaactgacgcatacgctgaatacgctggcgcatatcagtcagctcttgttcccaaatcgcacgtaacgcatcgttgctcaggatggtggcaacaacagaagcgccgtgtgctggtgggttagagtagttagcgcgaatcgccgctttcatttggctgaatgcgcgatcaacggtttcactgtcggcagcaaccagagtacaagcgccaacacgctcgttgtacaggccaaagtttttagagtaggaactggcaacaatcagctctttatgcatagccgcgaaagcgcgcagtccttcagcatcttcttccagaccacgggcaaaaccctggtaagcgaagtcaaacagcggtaaccagcctttctcaacggagagttgtgccagtgtttgccattgttccagcgtagggtcgataccggttgggttatggcagcagccatggaacagcactacgtcgccagcctgagcttcattcaggctgttaatcagtgcatcgaagtcaagagtgtgattttccgcatcataataagcgtattcacgaacttccagacctgcagagttaaagacgctcttatggttcggccagcttgggttgctcacccacacacgcttaacgctggtattttttgccaggaaatcggcagccacgcgtagtgcgccagtgccccccggagtctgtgccgtgcgagcacgtttgtcattgatcagggcgctacctttaccaaacagcagttcctgagtgcagcgaccaaattcagggatgccgtcaatgccgaggtaatttttggtggtttcattttcgagcagatactgttcagcctttttcacgctggtcagtaccggggttttgcccgtctcatctttatagacaccaatcccgaggttaattttgccgggacgttcatcggcacgaaacagatcggccaggcccagaatcgggtcggcaggagcggcggtaatgttctcaaacatgacgaggttccattatggttacagaagggaagtccgctatcagggtaacgggagatttacaaaattccaactattactgatgaaaacgcaggctgtttttgcaagacgtgagattgctctggaaggtataaaaaaaacaggaccaaagtcctgttttttcggcatttaacaaagaggtgtgctattagaactggtaaacgatacccacagcaacggtgtcgtcactacctacgcccagtttgttgtcagaatcgatctggttgatgatgtagtcaacataggtggacatgtttttgttgaagtagtaggttgcgcccacttcaaagtagttcaccagatcaacatcaccgataccttctacgtctttcgctttagatttggtgtaagcgatggacggacgcagaccgaaatcgaactggtattgcgcaactaacagaacgtcttgcgttttgttggcgaagccgctggtgtttgtaaatttattagtgatcggcgtagcgttacgggtttcaccgtagttcgctgccaggtagatgttgttcgcgtcgtacttcagaccagtagcccactgttcagcttttttaccgttgccaagaggttgagcttcttgcaggttggtacggtcagctgcaccataagcaccaacgataccaaagccttcgtattcgtagctgatagaaccgccaacaccgtcgccgttagaacggcgtgcagtgtcacgctcgtttttacccaggtactgaacagcgaagttcaggccatcaaccagaccaaagaagttggagttacgataggtagcaacgccgccaacacgaccaacgaagaagtcatcgctgtatgcagtatcaccaccaaattctggcagcatatcggtgtaacccagtgcatcataaaccacaccgtagttacggccgtaatcgaaagaaccaacgtcagcgtatttaagacccgcgaatgccagacgcgttttgttaccagtttgagcgtcagcgccttcagagttgttaccctggaagttatattcccactgaccataaccggtcagatcggaattgatttgagtttcccctttaaaaccaagacgggcataggtcatgtcgccattgccaccgtaactgttttcaccgttacccttggaaaaataatgcagaccaacagctttaccgtacagatctactttgttgccatctttgttatagatttctgcagcgtttgcagtacctgctactaacagagcagggacgatcactgccagaatattgcgcttcatcattatttattaccctcatggttttttttatgacacctgccactgccgtcaataagttctgtcaataaaaatttacggaactattgatgagagtttggtgtctttatgtgtctgcaggcatctttccattcaaactaacgtttcgctaccgtgaaagtgctacaaagataaagatttggtttcaaaaagaaaaaatatgtaaccaaaagtaaaatttaaggaactttgtgaacaccgtcatatttccatagagacgtgatgatatttacagcaattttaatctatttatatgatttccttatatttaaattaactaaacggaaattttgtttctgatggaaactttatcgacctggcacaaaatcttctttcagacatccagaatgccaaaaaatagtatgaaaattgtgctattagctaagaaaaaactaatccgcaataagaatgcggattagtttttgcgcgtaaatgttgcaatgtaatattccgtaacaggatgatcgttatggcggggttgcaaatagattgcttgacttaacaaacagataacttgacagaaaagataaaaaaagagccagcgggcgctggctcttgaagacgctaaattagaagctggcgttacgcggagtacgtgggaacggaatcacatcacgtacgttttgcacgccagttacgtaagcaatcagacgttcaaaaccaagaccgaaaccactatgcggaacagtaccgtagcgacgcagatcgcgataccaccagtaatcttctttattcaggcccatttccagcatacgctcgtccagcacgtccagacgttcttcacgctgggagccaccaatgatctcaccgatgcccggagccagaacgtccatagccgcaacggttttaccgtcttcgttaaggcgcatatagaacgctttaatatctttcggatagtttttaaccactaccggtgctttaaagtgttcttccgccagataacgctcatgctcagaagagagatcgactccccagtaaaccgggttttcaaacttcctgccgcagttttcgagaatggtcactgcgtcggtataatccacctgcgcaaaatcggcttcaatgaagcgttccagacgactaacggcatctttatctacgcgttcagcgaagaatttcatgtcgtcagcgcgttcttcgagaaccgctttgaagacatatttcagcatggcttcagccagacccgcaatatcgttcaggttagcaaacgccacttccggctccagcatccagaattccgccaggtgacggctggtgttggagttttcagcacggaaagtcgggccgaaggtataaattttggacaatgcgcaagcgtaggtttcgccgttcaactggccagatacggtcaggaaagactctttaccaaagaagtctttgtcgaaatccactttgccctgatcgttacgcggcaggttttccagatccagcgtagaaacgcggaacatttcgcctgcaccttcggtatcagatgcggtaatcagactcgtactaacccagaagaatccctgctcgttaaagaagcgatgcagcgcctgcgccagcgtatggcgaacgcgcgcgacggcaccaatcaggtttgtgcgcggacgcaggtgagcgacttcacgcagatactcaatgctgtggcgttttgccgccatcgggtaagtgtctggatcttcaacccaaccagcaacttcaaccttgctggcctgaatttcaaattgttgcccctggcccgggctcgccacgactttacccgtcacaatgacgctgcagccggtggtcagacgcaggacgtcttcattgtaattgggcagagaattattgatgacagcctgtacaggatcaaagcaggaaccgtcataaacggcgaggaaggagatgccagctttactatctcggcgggtacgtacccatccgcgcacggtgacttcgctgtcaacggctacacggccctggagtacgtcggctacaggcacaacgctcataatattctctctgttaatagtcggaaaaaataaacacttgtccacccgtaaatggggggatacctatgttacctggcatctgcaatcagacaagcagaattcgcaaatgcagcgaaagatttcggaattaaaggtaaaaaaagggagccgattagctccctgatgatattaactggcttttttaatatgcggaaggtcgaacgctttgcgcagcgcccgaacaaacgctttatcatggcagatagttttgccagggctgtcagaaagtttcgccaccggtttaccgttacactctaccaacttaatgacaatattcaggggttttacctgggggatatcgcaggtcaggcgagtcccaataccaaaacttaattgcacgcgggaagagaagtggcggtatagctcaaccgctttgcgtaaatccagattgtcagagaaaaccagcgttttactctgtggatcaattcccagcttttcataatgtgcaatggctttttcaccccattcaaccgggtcgccagagtcatgacgcaggccctgataccgactagcgaactcgacaccgaaatcacgcaggaaagcatccatagtgatgcagtcggttaatgcaatgccaagttggtcgggatactcttccagccaggcagcaagtgcagctcgctggctgttggctagatccgggctgatttgctgatgtgcctggaaccattcgtgtgcctgtgttcccatcggcgtgagggaaagccgacgcgccagatcgtagttgctggtgcccacaaaccaggattcctgttgcagacgcttaacgatggtttcttgtacttcgcgagaaaaacggcgacgggtgccaaaatccatcagatggaagcggctcatatcaagaccggcggttaacgcgctgaagtcgactaatttgctttccagcgtgtcgagggcttgcgcaacgtcggcctgcggactgcgatagcgatgtaccatttcactgataaccgccagcaaaggaacttcccagaggatgacttcacgccacgggccgcttaaacgaatatccagcttgccattatcgttggacacggtgacttgttccgggttaaagcggaactcgcgtaaccagttaagatagtcggccttaaagaaaggcagggcagaaagccactgatattcatcatcctgcaggcgcaggtgctgcatcgcctgaacctgttcacgaatagcatcggcataaatacccagcagatcgtcacctcggcaacgaaactccgccgcgacatgcacatcgtaatagtgatgaaacacggcttgctgcatatgcaacttataagcatctgtatccagcaagctgtgcagaacaggagaagcgaattgtgtcataggtgcgcagtagcgtcctcgtacaggagcgtttagtacaataaacatcttcaggaactgctggagtataccttgtttcgcaatttattgaaccccgatcacaccatatgccacctttctggtcgatggcattacgcggtgtatgttataaaaatgtagcaataaaggcgtttgtacctgaaaagatgaagattctgcatagcgcgatttacgcaacaggaatagactgaacaccagactctataaaagatgctaaaggttatttatgactcaacagccacaagccaaataccgtcacgattatcgtgcgccggattaccagattactgatattgacttgacctttgacctcgacgcgcaaaagacggtcgttaccgcggtcagccaggctgtccgtcatggtgcaagtgatgctccccttcgtctcaacggcgaagacctcaaactggtttctgttcatattaatgatgagccgtggaccgcctggaaagaagaagagggcgcactggttatcagtaatttgccggagcgttttacgcttaagatcattaatgaaataagcccggcggcgaataccgcgctggaagggctttatcagagtggcgatgcgctttgcacccagtgtgaagccgaaggtttccgccatattacgtattatctcgaccgcccggacgtgctggcgcgttttaccaccaaaattattgccgataaaatcaaatatcccttcctgctttccaatggtaaccgcgttgcgcaaggcgaactggaaaacggacgccattgggtacagtggcaggacccgttcccgaaaccgtgctacctgtttgcgctggtggcaggcgactttgatgtactgcgcgatacctttaccacgcgttctggtcgcgaagtagcactggagctgtacgtcgatcgcggcaaccttgatcgcgcgccgtgggcgatgaccagcctgaaaaactccatgaaatgggatgaagaacgctttggcctggagtatgacctcgacatctatatgatcgtcgcggtggatttcttcaatatgggcgcaatggagaataaggggctgaatatctttaactccaaatatgtgctggcccgcaccgacaccgccaccgacaaagattacctcgatattgaacgcgttatcggccatgaatatttccataactggaccggtaaccgagtgacctgtcgcgactggttccagctcagcctgaaagaaggtttaaccgtcttccgcgatcaggagttcagctctgaccttggttcccgcgcagttaaccgcatcaataatgtacgcaccatgcgcggattgcagtttgcagaagacgccagcccgatggcgcacccgatccgcccggatatggtcattgagatgaacaacttctacaccctgaccgtttacgagaagggcgcggaagtgattcgcatgatccacaccctgcttggcgaagaaaacttccagaaagggatgcagctttatttcgagcgtcatgatggtagtgcagcgacctgtgacgactttgtgcaggcgatggaagatgcgagcaatgtcgatctctcccatttccgccgttggtacagccagtccggtacaccgattgtgaccgtcaaagacgactacaatccggaaaccgagcagtacaccctgaccatcagccagcgcacgccagccacgccggatcaggcagaaaaacagccgctgcatattccgtttgccatcgaactgtatgataacgaaggcaaagtgatcccgttgcagaaaggcggtcatccggtgaattccgtgctgaacgtcactcaggcggaacagacctttgtctttgataatgtctacttccagccggtgcctgcgctgctgtgcgaattctctgcgccagtgaaactggaatataagtggagcgatcagcaactgaccttcctgatgcgtcatgcgcgtaatgatttctcccgctgggatgcggcgcaaagtttgctggcaacctacatcaagctgaacgtcgcgcgtcatcagcaaggtcagccgctgtctctgccggtgcatgtggctgatgctttccgcgcggtactgcttgatgagaagattgatccagcgctggcggcagaaatcctgacgctgccttctgtcaatgaaatggctgaattgttcgatatcatcgacccgattgctattgccgaagtacgcgaagcactcactcgtactctggcgactgaactggcggatgagctactggctatttacaacgcgaattaccagagcgagtaccgtgttgagcatgaagatattgcaaaacgcactctgcgtaatgcctgcctgcgtttcctcgcttttggtgaaacgcatctggctgatgtgctggtgagcaagcagttccacgaagcaaacaatatgactgatgcgctggcggcgctttctgcggcggttgccgcacagctgccttgccgtgacgcgctgatgcaggagtacgacgacaagtggcatcagaacggtctggtgatggataaatggtttatcctgcaagccaccagcccggcggcgaatgtgctggagacggtgcgcggcctgttgcagcatcgcagttttaccatgagcaacccgaaccgtattcgtagcttgattggcgcgtttgcgggcagcaatccggcagcgttccatgccgaagatggcagcggttacctgttcctggtggaaatgcttaccgacctcaacagccgtaacccgcaggtggctagtcgtctgattgaaccgctgattcgcctgaaacgttacgatgccaaacgtcaggagaaaatgcgcgcggcgctggaacagttgaaagggctggaaaatctctctggcgatctgtacgagaagataactaaagcactggcttgataaataaccgaatggcggcaatagcgccgccattcggggaatttacccctgttttctcaggcgagtttcagattcaccacgttgcatcacccgttgcaacacctccgcttccagctccgctaatcgcacgctccctaatcgacgcggacgggggatatccactgtcaaatccagaccaatttttccctcttcaattaacagcacccggtcagccatcgctaccgcttcgctcacatcatgcgtcaccaacagtacggtaaagccgtgctcctgccaaagactcacaatcaaatcctgcatctcgagtcgcgttaaggcgtccagcgccccgagcggttcatcaagcaacaataatcccggtcgatgaatcaacgctcttgccagcgccactcgctgtttctgcccgccagaaagtgcggcaggccattcccctgcgcgattctccagtcctaccgcagccaacgctcgacgtgcggcatcgcgccactggcctttaaggcctaacccaacgttatcaatcacgcttttccacggtagcagacgcgcatcctgaaacatcattcgcgtgtcttcctgaatttcagccagcggtgtggtgcccgctaacacatcgcctgcggttggcgtttccagacctgccagcaggcgcagcagggtacttttgccaccaccgctgcggcccaccaccgccacaaactgacctgccggaatatgtaaatccagttggttcaggacgatattttccgcgtaatgtttgcttactgcattgagcaacaatggcgtgccctggttcagacgagcagtattcataccgtggcctccttcaaatgataagccgggttccagcgcaaccagaggcgctctaacagctgcgcgctgacgtcagccagtttgccgagcagggcgtaaagaataatagcgactaccaccacgtccgtttgcaaaaacccccgcgcattcatcgccagataaccaatgccactattggcagaaatggtttcggcaacaatcagcgtcagccacatcaggcccaacgcaaaacgcacgccgaccataatactgggcagggcaccaggcaggatcacatggataaacagcggtatgccggataatccatagctacgcgccatctccaccaacccgcgatcgatattacggatgccatgccaggtgttgatataaatggggaatagcgtaccgagcgccaccagaaagatttttgcggattcatcaatgccaaaccacaaaatcaccagcgggatcagcgccagatgcggcacgttgcgcaacatctgaatactggtatccagcagccgttctccccagcgagatagcccgctaatcagtcccaaaatcaaccccaggcttccgccaatactaaagccaatcagcgcccgccaggagctgatcgccagatgctgccacagttcgccgctggcggagagcgtccagaacgccgtcaccactccttccggactaggcaaaatacgcgtgctcagccagccaacgctggaggccagttgccacaccgccacgatgcccaccggtaaaaaccagggggcaacgcgcaataaccacttcttcactggcgttgccattatttcttccttagctttgcgcgactttacgggggataaaatcattcgccaccgcttcgccttgcggattcagcggctgcggctggggaatttccgggatggcgacatccagaagcgggaacagcaactcgccaacccgatacgcttcttccagatgcggatagccgctaagcacaaaactgtcgatgccaagcgcggcatattcgttgattcgcgcagcgaccgtaggaccatcgcccaccagcgccgtcccggcaccgccgcgcactaagccaacgcccgcccataaattggggctgatctccagattgtcgcgcttgccgttatgtaacgccgccattcgctgttgccctacggaatccgtccgggcgaatgcggcctgtgctttggcgatagtttcatcatcaagatggctgattaaccgctcggcggcctgccacgcttcgtcgttagtttcacgaacaatcacatgcagacgaataccgaaacgaattttgcgtccatgcgcggcagctttcgcccgcacttgttcgattttctctttaaccagttccggcggttcgccccaggtgaggtagagatcaacctgttctgccgccagctcctgggcgacatcactgcttccgccaaagtaaagtggcggatacggctgttgaatcgccgggaagagcagttttgctccgcgcacatgaatatgtttaccgttgaaatcgacggtttctctctgcaataaacgccgccagacctgggtaaattccgcgctggcttcgtagcgctcgctatgatcaaggaacactccgtcgcctgccagctcttgtggatcgctgcctgtgaccaggttaaacaacgcacgtccattactgagacggtcaagcgtggcggcctggcgggcggcaacggtaggactggttacgctgggacgcagggcgacaagaaacttcagccgctgcgtcaccgggatcatgcttgcggcaaccagccacgcatcttcgcaggagcgccccgttggaattagcacaccggtatagccaagacgatccgccgcttgcgcaatttgttgcagataaccgtgatcaaccgggcgactaccttcttccgttcccagataatgcccgtcaccgtgggtcggtaaaaaccagaacatattcagactcataattgttttccttccagttgagtgggctgccagatgcgctggcgaatatcgacttttttcggcaccagacgattttcataaaacagatctgccgtttgctgctgtaaggcggcaacctcggcgttaaccggtttgatggtggtaggagggcgatgatctaagtaagaggcaatcaccggtgccggtaagcccatcgtttttgccagtaaagcgatgctttgctcgcgctggctgcgggttaacgcatcggcctcactaaaggttgccagtacgccctgaataaaagcgccgtttttttctgcatagggacgagctgccagataaaagcttccagtttgattgagatcggtgccgtctttcagcacccgcacgccgccctgtaataatgcagcagagtagtagggatcccagatagcccaggcgtcaacgttaccttgctggaacgcggcgcgggcatcagcgggcgtcaggtaagtgggttggatatcggtaaacttaagtccggcctgacgcagtgcacgcagtaaaaggttgtgactactggaacctttctgaaaggcaactttgtgacctttaagatcggctacggttttgatcgggctgttttctgccaccagaatcacttcggctttgggcttcggtggctcgacgcccacgtacaccaaatcagccccggcagcctgggcaaagattggcggaatatccccggtactgccgagatcaatactgccaacgtttaacgcttccaacatttgcggacccgcggggaactccacccaggagattttactttccggatagcgtttttccagtaactggtggctttttgccagcaccataccaatactgcctttctgatagcctatacgtaacgcttcagggctggattctgcagcaaccgcaaaagtagagacgctaagcaatcccgccagcgccagtttaatgatgttacgcatgggcattacctcgcagagacagaaggtcaggaacctgaacatcgcggcggtgcaatgcctgccagaaagtttctagcgcggtatcaagacgggtttgcagatttggcgtgaactggggtctgtgatggtaatcaattacttgactgtcatcggcaaacacgccgtgcaggatctcctgagctttcagtgcgcttaaaactggtttaagggcataatcgaccgccagcagatgggccacggtaccgcccgtcgccagcggtagcaccactttgccttgcaaagcgcgttctggcagcaggtcgagcagggttttcaacgcaccggaataggcggctttatacacaggcgtggcgacaatcagcccatcggcctgttgcagctgttcggtgaaggtcttgagtgccggactatcgaaacgagcataaagtagatcttccggggcgaagttttgcagattccagtgataaacctctacatccaggccatttagtttttcccgcgcatattccagcaaggagctggagcgagaaggaaagcgaggactacccgccagggtgatgacacgcatactctctccttataaccaattgttctttttttgttaacattgataacaattcggtcagtctgtcggagagacaagaaaattccaaatataaattttgtgtatctttttctgaaaataaactaaagaaagggctttatatatcacgcatatttatttattggatagtcattagatgttgaatcaatgaattactcgttcagttaatatttaaatattcatgaaatctataaattaaagatttgtcacttattggatttagtatgcttgatttaaatggcggacaattattgttattattaagtctaatgtcatttaaaggcattatcatatttacgaagagatcaggatgataacgatgaaaaaaagtgtattgacggcgtttataactgtggtatgtgcaacgtccagcgttatggctgctgatgataatgctatcacggatggcagtgtaacatttaatggtaaagttattgctccagcttgtaccctggtagctgcgacgaaagattccgtggtgactttgccagatgttagtgccacgaagttgcaaaccaatggtcaggtttctggcgtgcaaattgatgtgccaattgaattaaaagattgtgatactaccgtaacaaaaaatgcaacgttcacctttaatggcactgcggatactactcagattacagcgtttgctaaccaggccagttctgatgctgctacaaacgtggccctgcaaatgtatatgaatgatggtacaacggccatcacgccagacacagaaaccgggaacattttgttgcaggatggagatcagacgttgacttttaaagttgattatatcgctacggggaaagcgactagtggtaatgtgaatgcggtaacaaatttccatattaactattattaatagaactcattaattgttttattaattagtacccctccagtgttctggaggggatattcatattttttaagagtgactatttatgaaaacttgcataacaaagggaattgtgaccgtaagtttaacggcaatattactcagctgcagttccgcatgggcggcaggtaaaggcgggattggacttgcagcaacacgtcttgtttatagtgaaggtgaagagcaaattagtctgggtgtacgtaacaccagtccggatgttccttatcttattcagagttgggtgatgaccccagataataaaaaaagtgcagactttattattacaccaccgctatttgtgctgaatccggcaaatgagaatctgttacgcattatgtacattggagcgccgttggcgaaagacagagaaacccttttcttcactagcgtacgggcagtccctagtacaacgaagcggaaagagggaaataccctgaagattgccacacaaagcgtcatcaaacttttctggcgaccaaaaggtttagcgtatcccttaggcgaggctccggcgaaactgcgttgcactagcagtgctgacatggttacggtcagtaacccaacaccttatttcattaccctgacagacctgaaaataggtggaaaagtagttaaaaatcaaatgatttccccctttgataaataccaattttctctgccaaagggggccaaaaatagcagcgtaacgtatcgaaccatcaatgactacggggcggaaacgccgcaactcaactgtaaaagctaagccgtcttcagttaagagagcgagatgtatagaactcatcgacaacacagcctgttaagctctggtggagtgccaagctttattggtgggctggtggtgtttgtgagcgcagcgttcaatgcacaagctgaaacctggttcgatcctgcttttttcaaagatgatcccagtatggtggccgatttgtctcgtttcgaaaaaggacaaaaaataacgccaggggtttatcgtgtcgatattgttctgaatcagacaattgtagatacgcgcaacgtcaattttgttgagataacgccagagaaggggattgccgcctgtttgacgactgaaagcctggatgcaatgggtgttaatactgatgcgtttccggcttttaaacaactggacaaacaagcgtgtgtgccattggcggagattattccggatgccagcgtaacgtttaatgtgaataaactccgtctggaaattagtgtaccgcaaatcgccatcaaaagtaatgcccgtggttatgtcccccctgaacgttgggatgaagggatcaacgcgctattactgggatatagctttagcggggctaacagtattcatagcagcgcagacagtgattctggcgacagctattttctgaatttaaacagtggcgttaatttaggcccatggagattgcgcaacaatagtacatggagtcgtagtagtggccaaaccgcagaatggaagaatctcagcagctatttgcaacgggcggttattcctctgaaaggcgaactgaccgtaggtgatgattatactgcaggcgattttttcgatagtgtcagctttcgtggtgtgcagctggcgagtgatgacaacatgctgccagacagcctgaaagggtttgcgcctgtggtgcgtggtatcgccaaaagcaatgcccagataacgattaagcaaaatggttacaccatttaccaaacttatgtaagccctggtgcttttgaaattagtgatctctattccacgagcagcagcggtgatttgttagttgaaatcaaagaagcggacggcagcgtcaatagctacagcgtaccgttctccagtgtgccattactccagcgtcaggggcgaatcaaatacgcggtgacactggcgaaatacagaaccaatagtaatgaacagcaggagagcaaatttgcccaggccacgttgcagtggggcggaccgtggggaacgacctggtatggtggtggacaatatgctgaatattaccgtgccgccatgtttggtctgggatttaacctcggcgatttcggagcaattagcttcgatgcgacccaggcgaagagtacgctagcagatcaaagcgaacataaaggtcagagttatcgttttctgtatgccaaaacgctcaaccacttgggcactaactttcaattgatgggctatcgctatagcacgagcggtttctacaccctttccgacaccatgtataaacatatggatggctacgaatttaatgacggtgatgatgaagatacgccgatgtggagccgttattacaatttgttttacaccaaacgtggcaaactgcaggtcaatatctcccagcaattaggcgagtacggtagcttttatttaagtggtagccagcaaacttactggcatacggatcaacaggatcggctattacagtttggctacaacacgcaaattaaagatcttagcctggggatttcctggaactacagtaagtcccgtggtcaacctgatgctgatcaggtgtttgctctaaatttttccctgccgctcaatctgttgctccccagaagtaatgatagctataccaggaaaaaaaattacgcctggatgacctctaacaccagtatcgataacgaagggcacactacacaaaacctgggtttaacggagacattactcgatgacggtaacctgagctacagcgtgcaacagggatataacagcgaggggaaaacggctaatggtagcgccagcatggattacaaaggggcgtttgcggatgcccgagtgggctacaactacagcgataacggcagtcaacaacaactgaactacgctcttagtggcagtttagttgcccatagtcagggcattaccctggggcaaagcctgggggaaactaacgttctgattgcagcaccaggcgcagagaatactcgtgtggcgaacagcaccgggctgaaaactgactggcgcggatataccgttgttccttatgccacttcttatcgggaaaatcgaatcgcacttgatgcggcgagcttaaaacgtaacgtggatcttgaaaatgcagtagtcaacgtggttcccaccaaaggggcgttggttctggcggagttcaatgcccatgcgggtgcaagggtattaatgaaaacaagtaagcagggtataccgctgcgttttggcgcgatagcgacgctggacggcgtacaggctaatagcggcataattgatgatgatggcagcctctatatggcgggtttaccggcgaagggaacaataagcgtgcgctggggcgaagctcccgatcaaatttgtcatatcaattacgagcttaccgaacaacaaattaactctgcgattacgcgaatggatgccatatgcagataatctttggagaaaaatgcgtgagtttactacgactattttttgccgccgtcttaatgttatggtgcgctcaaaccgctgcttatagcgggcagtgtcatactactcaggggaatccgtatattggcgtcaattttggcgttaaaaccctggaggaagaagcaaatacggcaggggtagttaaagacaaattttatcagtggaacgaaagcaatgattattatgtttcctgtgattgcgataaagacaatgtcagaagtggccgatgggcattcgccgcggatagtccgttagtctatttaggcgacaactggtacaaaattaatgactatcttgccgccaaagttttattgcaggttaaaggcagttctcctactgcggttcctttcgaaaacgtgggcacagggggggatacccgatggcatatttgcgaccctggcggtcaacgtttaggtgggcagggggcaagcggtaatagcggtagcttttccctgaaaatattgcagccgttcgttggcagcgtcgtcattcctcctatggcgctggcgcgattatatgaatgctacaacatacccgcaggtgattcctgcacgactacaggtacaccggttttagtgtattacctgtctggtacgatcaatagtcttggcagttgttccgtcaatgccggagagacaattgaagttgatttaggtgatgtcttcgctgccaatttccgtgttgtagggcataaacctcttggggccagaacggcagaacttgcaattccagtcaggtgtaacacgggaaacgcgggattagttaatgtcaacctgagtctgacggcaaccacagaccccagctatccccaggcgattaagacgagtcgtcctggcgtgggcgtggtggtgaccgatagccagaacaacattatttcccctgctggtggaacattaccgctctctattcctgatgatgcagacagtatcgcgcgaatgaatgtctatccagtcagcacgacaggtgtaccaccagaaaccgggcgatttgaagccacggcaacggtgagaataaattttgattaacgcgtgaacgtatgaagaaaaaaacgatatttcagtgcgttatcttgttctttagcattcttaacatccatgtcgggatggctgggcctgaacaagttagtatgcatatttatgggaatgtggtcgatcagggctgtgatgtcgccaccaaaagtgcattacaaaatattcatattggtgattttaatatcagtgattttcaggccgcgaataccgtaagcactgctgctgatttgaatatcgatatcaccggttgtgccgctggtattactggcgcggacgtcctttttagcggcgaggctgacacccttgcgccgacactgctcaaactaactgacacaggcggaagcggtggtatggcaacggggattgccgtgcaaattcttgatgcgcaaagtcagcaagaaatcccgctcaatcaggtccagcctcttacgcccttaaaagccggggataacacactcaaatatcaacttcgttataagtccacaaaggcgggagcaacgggcggtaatgcgacggcggttctctattttgatctggtttaccagtgaaggagtgatgttgaaacggataatctggattctgttcttattgggattaacgtggggctgtgagctatttgcccatgatggcacggtcaacattagcggaagctttcgccgtaatacatgcgtgctggcacaggatagcaagcaaatcaatgtgcagttaggcgatgtcagcctgacacgtttttctcatgggaattatggcccggagaaatctttcatcattaatttgcaggattgcggaacagatgtcagcacggttgacgtcacctttagtggaacccccgacggagtgcagagcgaaatgttgtccattgaaagtggtacggatgcagccagcgggctggcaattgcgattctggatgatgcgaagatattgattccgcttaaccaggcgagtaaagactacagcctacatagcggtaaggtgccattaactttttatgcgcaattgcgacctgtcaatagcgatgtgcagagcggtaaagtgaatgccagcgcgacatttgtacttcattatgactaatacgtggaacagattggcgctcttgattttcgccgttttaagcctgctggtggcgggtgaattgcaggcaggagtggtggtcggcggaacgcgatttatctttccggcagacagagaaagcatatctattttactgactaataccagtcaggaatcctggcttattaacagtaaaatcaaccgcccaacgcgttgggccgggggggaagcgagcacagtgccagcaccattactggccgctccgccacttattctcctgaagcccggtacgacaggcacgttgcgcttgctgagaacggaaagcgacatcttgcctgtggatcgcgaaacgctatttgagttaagcattgccagcgtgccatccggcaaagttgaaaatcagagcgtaaaagtggcgatgcgcagcgtatttaaactgttctggcgacccgaaggtttgccgggcgacccgctggaagcttatcaacaattacgctggacacggaatagccagggtgtacaactcactaacccaacgccttattacattaacctgattcaggtgagtgtaaatggtaaagcgttaagtaatgtgggagttgtgccgcctaaaagccagcgtcagacaagctggtgtcaggcaatcgcaccgtgtcatgtcgcctggcgggcgataaatgattacggcgggttgagtgcaaagaaggagcaaaatctgccctgaaacaggttcggaaaacgtttgcgttttttttgccgcaggtcaattcccttttggtccgaactcgcacataatacgcccccggtttgcacaccgggaatccaggagagttcatgtactaccccttcgttcgtaaagcccttttccagctcgatccagagcgcgctcatgagtttacttttcagcaattacgccgtattacaggaacgccgtttgaagcactggtgcggcagaaagtgcctgcgaaacctgttaactgcatgggcctgacgtttaaaaatccgcttggtctggcagccggtcttgataaagacggggagtgcattgacgcgttaggcgcgatgggatttggaagcatcgagatcggtaccgtcacgccacgtccacagccaggtaatgacaagccgcgtctctttcgtctggtagatgccgaaggtttgatcaaccgtatgggctttaataatcttggcgttgataacctcgtagagaacgtaaaaaaggcccattatgacggcgtcctgggtattaacatcggcaaaaataaagatacgccagtggagcagggcaaagatgactatctgatttgtatggaaaaaatctatgcctatgcgggatatatcgccatcaatattagtagcccgaataccccaggattacgcacgctgcaatatggtgaagcgctggatgatctcttaaccgcgattaaaaataagcaaaatgatttgcaagcgatgcaccataaatatgtgccgatcgcagtgaagatcgcgccggatctttctgaagaagaattgatccaggttgccgatagtttagttcgccataatattgatggcgttattgcaaccaataccacactcgatcgttctcttgttcagggaatgaaaaattgcgatcaaaccggtggcttaagtggtcgtccgcttcagttaaaaagcaccgaaattattcgccgcttgagtctggaattaaacggtcgcttaccgatcatcggtgttggcggcatcgacagcgttatcgctgcgcgtgaaaagattgctgcgggtgccagtctggtgcaaatttattctggttttatttttaaaggtccgccgctgattaaagaaatcgttacccatatctaattatttcttcgaattcctctttataagataatcagggctttattttcagccctggttgttttatattcatcgctgttgcttatttagacattttgtacttttattgttgaggttattaagcgaagcgacaatggattgtgttgctgcggttttatagggtaggggagaggcagatgcgaattaaaccagacgataactggcgttggtattacgatgaagagcacgatcgaatgatgctcgatttagccaatggtatgctatttcgcagtcgttttgcgcgcaagatgttgactccagatgccttttctcccgcaggcttttgcgttgacgacgccgcgctctatttctcttttgaagaaaagtgccgcgattttaatttatctaaagaacaaaaagccgaactggtgctgaatgcactggtagcaattcgctatctcaaaccgcaaatgccgaaaagctggcattttgtttcccatggtgaaatgtgggtgcccatgccgggcgatgcggcctgcgtttggttgagcgatactcacgagcaggtcaatttgctggtcgttgaatctggcgaaaatgccgcactatgcctgctggcacaaccctgcgttgttattgcgggtcgcgcgatgcagttgggcgacgccattaaaatcatgaacgacaggctgaaaccgcaggttaatgttgacagcttcagcctcgaacaggcagtttaacgcgccaacttaagtgcagtcttcggtacacagctacagcaaagaatggtgccatcatcgcccattgcactttttttcagcggcgtgacttcgccttctaaaagctgaacacggcaacttccacaaatgcccgcgcggcaagaataagggatacgaattccctgattttctaattgctccagcaacacctgttggttatttccacgaaatgcctgtccctgccagtcaatatctacatttgcgtccggttgttgcgtgatgttggcggtatcatcagcggcagctgcgccgtaaatttttgccggagccgttgccagaatttccacctcatcgccaacgcgaatcacgccgctattacgggcaattaaattctgaccaaaatcgacatcgccgttatcctgggcagtgcggaaagattgcaatgtttttaatggttcgcctgccggatgtttttgccctttttctgggctgacggtggtgaaaatacagcggctacaaggtttaaccacatcaaacaccacatcaccaatgcgaatcactttccagcgatcttcttcccaggcactcgcgccggaaaccaccagattggggcggaattgctccatttttacactggccggacaacgttgttggagatcacgtaagctggcttcgttagcaagaaggtaaggatagccatcagcaaaactcagaggtacagtgttgtggcgtttcacgcgccgggtcatttgtggccccacccagcgtaattgcacttcgcgggagaaaaatccacttagccatttgttgatcgcgtctggcgcaattcgcgcggtaaaatgtgtgccccaaacttcggttggtgcgtcttgtgtggcgaaatcagcaaaacgaacatatgcgctactgccatctggtgcggtgagatgcaagccatcatgcacaggactaggagtaaaccgtaccatctggggaaactggcgagcggtaataaacgtaccgtcaggttccgtgatcataaagatgcgatcgaaggccagaccactgacatctgccagagcatgtgtaagaccaatgccgcgcatgcttttaacaggatgaataaaaagccggattaatgtcgccacggtgcggtcctcaaatgaaaataagccctcaactttatgacatgacgcgcttattagctataatgcgcaacaattttcttagcgcctgtcccattaggctattttatttgtcagtttggccctgggttatgctcgaaatcctcacgtacttgtgtacgctccggtttctccgcgctgtccatgtccagactgactgcaacaattacgcctactgcggtaggctcttagagtaaaagtgacgatatgaattctctgtttgccagtacggcccgtgggctggaagagctgttaaaaactgaactggaaaacctgggggccgttgaatgccaggtggttcagggtggggtccatttcaagggcgacacacggcttgtttaccagagcctgatgtggagccgcctggccagccgtattatgttgccgctgggcgagtgtaaggtttacagcgatttagacctctatctcggtgttcaggcgatcaactggacagagatgtttaatcctggcgcgaccttcgctgtccacttcagtggtttgaatgacaccatccgcaacagtcagtacggcgcgatgaaagtgaaagacgcgatcgtcgatgctttcacgcggaaaaatctgccgcgtccaaatgttgatcgcgatgcgccggatatccgcgttaacgtctggctgcataaagaaaccgccagtatcgctcttgatctgagtggtgatggtttacatctgcgtggctatcgcgatcgtgctggtattgcgccgatcaaagaaaccctggcagccgctattgtgatgcgatccggctggcagccaggaacaccgctgctcgatccgatgtgtggttccggtacgttgctgattgaagcagcgatgctggcgaccgatcgcgcaccaggcttgcaccgtgggcgttggggctttagcggctgggcgcagcatgatgaagctatctggcaggaagtgaaagcggaagcgcaaactcgcgcccgtaaaggcctggctgagtatagctctcatttttacggtagcgacagcgacgcacgggtgattcaacgtgcacgcactaacgcccgtcttgcggggattggtgaactgatcacctttgaggtgaaagatgtcgcgcaactgaccaatccgctgccgaaagggccgtacggcacagtgttgagcaacccgccatacggggaacgtctggacagcgaaccggcgctgattgcgctgcatagcctgctgggtcggatcatgaaaaaccagtttggtggctggaatctctctttgtttagtgccagcccggatctgctaagctgcttgcagctgcgtgcagacaaacagtacaaggcgaaaaacggcccgctggactgcgtacagaaaaattaccacgttgccgaaagcactccagacagcaaaccggcgatggtagcggaagactacaccaaccgcctgcgtaagaacctcaaaaaattcgagaagtgggctcgccaggaagggattgaatgttaccgcctgtatgacgccgatctgccagaatataacgttgccgttgaccgttatgccgactgggtggtggtgcaggagtatgcgccgccaaaaactattgatgctcacaaagcgcgtcagcgtctgttcgatattatcgctgcaaccattagcgtactggggattgcgccaaacaaactggtgctgaaaacccgtgaacgccagaagggcaaaaaccaataccagaaactgggcgagaagggcgagtttcttgaagttaccgaatataacgctcacttgtgggtgaacctgacggattatctcgatactggtctgttcctcgatcaccgcatcgcccgtcgtatgctcggtcagatgagcaaaggcaaagatttcctcaacctgttctcttataccggcagcgccaccgtgcatgcgggattaggcggtgcacgcagcaccaccaccgtggatatgagccgtacttatctggaatgggcagaacgcaacctgcgtctgaatggcctgaccgggcgtgcgcatcgcctgattcaggccgattgcctggcgtggctgcgtgaggcaaatgaacagttcgatctgatctttatcgatccgccaaccttctctaacagtaaacgaatggaagatgcgtttgatgttcagcgcgatcatctggcgctgatgaaagatttgaaacgtctgctgcgtgcaggtgggacgatcatgttcagcaacaacaaacgtggcttccgtatggatctcgacggcctggcaaaactgggactgaaagcacaagaaattacgcaaaaaacgctctcccaggatttcgcccgtaaccgccagatccacaactgctggctgattaccgcagcctgaaaggaatagtaatgagtttaatcagtatgcatggcgcatggctgagcttcagcgacgcgccgcttctcgataacgcagaactgcatatcgaagataacgaacgtgtttgtctggtgggccgcaacggcgcaggcaaaagcacgttaatgaaaatcctcaaccgtgaacaagggctggatgacggtcgcattatttacgagcaagatttgattgtagcgcgtctgcaacaggatccgccgcgtaacgttgagggtagcgtttatgatttcgttgccgaaggcattgaagaacaagcggaatatctgaaacgctatcacgatattagccgcctggtgatgaacgacccgagcgagaaaaatctcaacgaactggcgaaggttcaggaacagctggatcaccacaacctgtggcagctggaaaaccgcatcaacgaagtgctggcgcaactggggttagatcctaacgttgcgctgagcagcctttccggcggctggttgcgtaaagcggcattaggacgcgcgctggtgagtaatccgcgcgtgctgttgcttgatgaaccgacaaaccacctggatattgaaaccatcgactggctggaagggtttttgaaaactttcaacgggacgattattttcatctcccacgaccgtagctttatccgcaatatggcgacgcgcattgttgatctcgatcgcggcaagctggtgacctatccagggaattacgaccagtacctgctggaaaaagaagaagccctgcgcgtggaagaattacaaaatgccgagttcgatcgcaaactggcgcaggaagaggtgtggatccgccaggggatcaaagcacgccgtacccgtaatgaaggccgcgtacgcgccctgaaagcgatgcgtcgcgaacgtggtgaacgtcgcgaagtgatgggtaccgcaaagatgcaggtggaagaggccagccgctccggtaaaatcgttttcgaaatggaagacgtttgctaccaggttaacggtaagcaactggtgaaagatttttctgcccaggttctacgtggcgacaaaattgccctgattggtccgaatgggtgcggcaaaaccacgctgctaaaactgatgctcggtcagcttcaagcggacagcgggcgtattcacgttggcaccaaactggaagtggcttatttcgatcagcaccgcgcggaactggatcccgataaaacggtgatggataaccttgccgaaggtaagcaagaggtgatggttaacggcaagccacgccacgtattgggctatttgcaggactttctgttccatccgaaacgggcgatgacgccggtacgtgcgctttctggcggtgagcggaaccgcttgctgctggcgcgtttgttcctcaaaccaagcaacttattgattcttgacgaaccgaccaacgatcttgatgtcgaaacgctggaactgctggaagaactgatcgacagctatcagggcacggtattgctggttagccacgatcgtcagtttgtcgataacaccgttacagaatgttggatcttcgaaggcggcggtaaaattggtcgttatgtcggcggttatcatgatgcccgtggtcagcaagagcagtatgtggcgctcaaacagcctgcggtgaaaaaaaccgaagaagccgccgcggcaaaagcagaaactgtaaaacgcagcagtagcaaactaagctataaattgcagcgcgaactggagcagctaccgcaattgctcgaagatctggaggcgaagctggaagccctacagacgcaagtggcggatgcttccttcttcagtcagccgcatgagcagacgcaaaaagtgcttgctgatatggctgctgcagagcaggagctggagcaagcctttgaacgctgggagtatcttgaagcgttaaaaaatggtggctgatcgcaaaatagtcgatttaaacagagacagctgacaacggtaaaattgcctgatgaactgggtttatcaggcatgaaaaccaacactttgttagtcatctgtaaaatagcgcatcattaaggagtaccaatgtgcgaacatcatcatgccgcgaagcacatcctgtgcagccagtgtgacatgctggtggcgttaccgcgccttgagcatggtcagaaagcggcatgtccccggtgtggcacaacgttaaccgtggcgtgggatgcccctcggcagcgtcccaccgcctatgcgttggctgcactgttcatgctgttgctgtccaacttgtttccttttgtgaatatgaacgttgcaggagttaccagtgaaattacattactggaaattcccggcgtgcttttttctgaggactacgccagcctcggcacctttttcctgttgtttgtgcaactggttcccgcgttttgtctgataaccattctgttactggtgaatcgcgcggaattaccggtccgtttaaaagagcaactggcacgggtgctttttcaactcaaaacctggggaatggcggagattttcctcgcgggtgtgctggtcagtttcgttaaactgatggcttacggcagcattggggtaggcagcagctttctcccctggtgtttattttgtgtcctgcaactgcgcgcttttcagtgcgttgatcgtcgctggttatgggacgacatcgccccgatgccagaactgcgccagccgctaaaaccaggcgtcacggggatacgtcaggggctgcgtagctgctcctgttgtacggcaatccttcctgctgatgaacccgtgtgcccgcgttgtagtaccaaagggtacgttcggcgtagaaacagcctgcagtggacactcgcgctgcttgtaacgtccatcatgctgtatcttccggctaatattttgcccatcatggtgacggatttattaggcagcaagatgccgagcacgattctcgctggggtcattctgttatggagcgaaggctcttatcccgtcgctgcggtgatctttctggccagtattatggtgccaacgttaaagatgatcgccatcgcgtggctgtgttgggatgccaaagggcatggcaagcgcgacagtgaaagaatgcatttgatttatgaagttgttgagtttgtaggccgctggagcatgattgacgttttcgttatcgcggtgctcagcgcgctggtgcgtatgggaggtttaatgagtatttatccggcaatgggtgcattaatgtttgctttagtcgtcataatgacaatgttttctgctatgacgtttgacccgcgtttgagctgggatcgtcaacctgaaagtgagcatgaggagtcctgacagtatggaatctaataatggggaagccaaaatccagaaagtgaagaactggtctcccgtgtggatatttcctatcgtcacggcgctcattggggcctgggttcttttttatcattacagccatcagggaccggaagtgaccctgatcaccgcgaatgcggaaggaattgaaggtggcaaaaccaccattaaaagccgtagcgttgacgtcggcgtggttgaaagcgccacactggctgatgatttgacgcacgttgaaatcaaagcgcggctgaattccggtatggaaaaattgctgcataaagacaccgtcttttgggtggtgaaaccgcagattggtcgcgaagggattagcggcctgggaacgctgctgtctggagtttatatcgaactgcagccaggcgcgaaaggcagcaaaatggataaatacgatttgctggacagcccaccgttggccccgcctgatgcgaaaggtatccgtgtgattctcgatagcaaaaaagccgggcagctcagcccaggagatccggtgctgttccgtggctatcgggtaggtagcgttgaaaccagcaccttcgatacacaaaaacgcaatatcagctatcaactgttcatcaatgcaccttatgaccgactggtgaccaacaatgttcgcttctggaaagatagtggcattgcggttgatctgacgagtgcagggatgcgtgtggagatgggcagtttgacaacgctgctgagtggcggtgtcagctttgatgtgccggaaggtctggatttagggcagccagtggcaccgaaaacagctttcgttttgtatgatgatcagaagagcattcaggatagcttgtacaccgatcacattgattatctgatgttctttaaagatagcgtacgcggtctgcaaccgggagctccggtagagttccggggtattcgcctgggtaccgtaagcaaagtgccattctttgcgccgaatatgcgtcagacatttaacgatgattaccgtattccggtactgattcgtatcgagccagagcggctgaaaatgcagcttggcgaaaatgcggatgttgttgagcaccttggcgaattgttgaaacgtggtttacgcggaagcctgaaaaccggaaacctggtcactggtgcactgtatgttgatctcgatttctatccaaatacgcctgcaataaccggtattcgtgaatttaatggttatcagattatcccgaccgttagcggcggcctggcgcaaatccagcaacgactgatggaagcgttggataagatcaacaaactgccattgaatccgatgattgaacaggcaaccagtacgctttctgaaagtcagcgcacaatgaaaaacctgcaaacgacgctggatagcatgaacaagatcctcgctagccagagcatgcagcagttgccgacggatatgcagagtacgttgcgtgaattgaatcgcagcatgcagggcttccagcctggctccgcagcctacaacaagatggtggcggatatgcagcgccttgatcaggtgttgcgagaactgcaaccggtgctgaaaacgttcaatgagaagagtaacgcgctggtatttgaagcgaaggacaaaaaagatccagagccgaagagggcgaaacaatgaaaaagtggctagtgacgattgcagcactgtggctggccggatgcagctccggcgaaattaataaaaactattaccagttacctgtggtgcagagcggtacacaaagtaccgccagccagggcaatcgtctgttatgggtagagcaggtcactgttcctgactatctggcggggaatggtgtggtttatcaaaccagtgatgtgaagtatgtgattgccaacaacaacttgtgggccagcccgttggatcaacagttgcgcaacaccctggttgccaacctgagtacgcaactgcccggctgggtggttgcctcccagcctctgggaagcgcccaggacacgctcaatgttaccgtaacggagtttaacggtcgctatgatggcaaggtcattgtcagtggtgagtggctgttgaaccaccagggacaactgatcaaacgtccgttccgtctggaaggagtgcaaactcaggatggttacgatgagatggttaaagtgctggccggtgtctggagtcaggaagccgcttctattgcacaagagataaagcgtctaccttaattataaagatttgtaaatataaccgtctccggtatgttgcctgaggcggtttttttgtctctaacgtgcggaaaaatttgttcctcttcacattttttgtacaaccgacatgcccgtgtagctcacaaatatgacagtggcgtgaattttgcgcattgacggcagttatgattcgcggtattgcttaactgtgattgcacatttagtaatcactgttttcttttccaccagaaaccagtatgagggaaacgaggcatgaagagacaaaaacgagatcgcctggaacgggcacatcaacgtggttatcaggccggcatcgccggacgcagtaaagaaatgtgtccctatcagacgctgaatcaaaggagtcaatggctgggaggctggcgagaagccatggcggacagggtagtaatggcctgattctgtctctttaaaaagaaacctccgcattgcggaggtttcgccttttgatactctgtctgattataatcagaaggcagacgtatcctggaacagaccgactttcaggtcgctggcggtatagatcagacgaccatcaaccagcacttcgccatccgccaggcccataatcagacgacggttaacaatgcgtttaaagtgaatacggtaggtcacttttttcgctgtcggcagtacctgaccagtgaatttcacttcgccaacgcccagcgcgcggcctttaccttcgccgcccagccagccgaggtagaaccctaccagctgccacattgcgtccaggcccaggcatcccggcataaccggatcgccaataaagtggcatccgaagaaccacagatccggattgatatccagttctgcttcaacataccctttgtcgaagttaccacccgtttcggtcattttgaccacacggtccatcatcagcatgttcggtgctggcaattgcgggcctttagcgccaaacagttcaccgcgaccagaggcaagaaggtcttcttttgtataggattcgcgtttatctaccatgttctctgtaagccttattttattgaagcacgcaggatagctaacacgtgtacgctgaacaagtccgatcagttcggaataaaccagttcagccaacgtaatggccatggaaaacggtgacgtccttcctgttggcttgcttgcgcgatacgttcctggatggtttgcatcagcgtcgtttggccttcgccatcccacaccagatttaataataacggcagtgcgtcagtcacatcgtctactgcccagatggtgaatttgccttcttctaccgctttcaccagttcactgtgaagacttaaatggcgaacgttagctgtggggataatgacaccttgtttcccggttaactcacgttgctggcaaatagcaaagaagccttcgattttctcatttaaaccaccgaccggctgggcgcgaccgaactgatcgacactacctgtgatagcgatactctgattcaccggcacatcggcgagggcgcttatcagggcgcagagttcagccatgctggcactatctccatcaacttcactgtaactctgctcaaatgtcaggcttgcactgaaggggatctgttgctcaagctgtagttcgctcatcaggaacgcttgcatgatcatcatccctttcgcatggatattgccgccaagctccgctttgcgttcgatgtcggtgaattcaccatcgccaatatgcacaacgcagctaatgcgagaaggttcgccaaaagcgcgtggatgacccggaaattcaatgacgctaagggcgttaatttgcccgatgcgttcgccttcggtttcaatcaggatttgctcctgaaggatctcatcctgcatacgttcagcgaggaaaccttcgcgccattcacgctgctgcagcattaagtttagctgctcgccggagaaggtgtcgccatcacacagggaggcgacctctttacactggcggaggatccactgcgggctaagcggaagtgtttcttgttcaccggtgtagcgtgctgcttcgcggataagtatcggccaggcatccgctcccggtgcaggtaagtgattatgtctggcggtaaatgtcacccagcgacaccactgggttacactctccgcatcgacaatctgcagagtatcttcaaattcgctataaatagcctgctcactaagctctggctccatctcctggaaatcagccaaactttcgcgttcgcctaccagaatgactttcagcttcaatggcatgctaggcacagagacggggagagggcggctctcatcaaacgcaacccagtcaaaacgctcgcggttaacgatatttttcagccgcatccacagcagaggttgcgccagcagtgtacgcaaagagataatgagaataccgccatttgcctgatgcaccagaccaggctgcagggtaatgtcgccattaaactggcgcaggcagccaaagagttgctccgcttctacccagtcggcagcgacaacttgcgttaaagtcgcaaaattatcatctgcactcactgcgtgacgtaagcggatggagtggccggaaacctcatagtgaccgcccaccagttggcctgcatcgctttgtagcgtacgcgcggcattggcaataagattcagatactcagactcttccggggccttcgccagcataaaagaggaggatgctcgcgtatgcagcaactgctccagcgcaaattgcagccgcggttgagtatcactgaataaaggatcgttttcgtcaatcaaatgtggctgagcaaatatttcctgatagctatcggtatcaggaaccaggtcacgccatgcaagtttcgtaatggtcaaagttgatgttttttagtctgttgtcaaagccgcgattataccgtaaccggcactacagcacacgtagaaagcaccgacaatactcctggcatgggcgttaaagctcacaggatggagattcttttcttcactggcctaaaaagctgatattctgtaaagagttacacggtaacattgagatcgctatgaaatatcaacaacttgaaaatcttgaaagcggttggaaatggaagtatctggttaagaagcatcgcgaaggggagttaatcacccgttacatagaagccagtgccgcccaggaagccgtcgatgtgttgctcagcctggaaaatgaacccgtgctggtaaatggctggattgacaagcatatgaatccggaactggtcaatcgcatgaagcaaaccattcgggcaagacgaaagcgccattttaatgcggaacaccagcatacgcgcaaaaaaagcatcgatctggaatttattgtctggcaacgtctggctggtcttgcgcagcgtcgcggtaaaacgctttctgaaacgattgttcagctgattgaagatgcggaaaacaaagagaaatacgcgaataaaatgtcttctctgaagcaggatctgcaggcattgctgggtaaggaataactgacgaaagtcagttcaatttactaaaggcaaaaaaaaccccgcagcagcggggtttttctaccagacgagaacttaagcctgcggctgagttacaacgtctttgatacctttaacttcgatctctacgcgacgatccggagccaggcagtcgatcagtgcagcacgctgtttcacgttgtcacaggtgttgccagtaaccgggttggattcgcccataccacgtgcggagatcttgtctgccgggatacctttggagatcaggtaatcaacaacagactgagcacggcgctcggacagaccctggttgtaagcgtcagaaccgatgcggtcggtgtaacccagaacaactacggaaccgtctttcggatccaggttgctcagctggctgtacagctgatccagagcagcctgaccttccggtttcagggttgctttgttgaagttgaacagaacgtcagacttcagagtgaagtgcttggtctgtacttccggtgccggagctggagccggagcaactactggagctgcttcgccctgaccgaaacggtaggaaacacccaggctcagcatgccgttgtccggacgagtgccgatggtgtgtgcgtcaccgatgttgttggtccactggtattccagacgggtagcgatttcaggagtgatcgcgtactcaacaccgccagcgaagaccggagaaacgccggtgtcgtggtttttaccataaacgttggatttagtgtctgcacgccataccatgccacccagacgagtgtagatgtccaggtcgtcagtgattgggtaacccagtttagcggtcagttgaacgccctgagctttgtatgcaccgttttcaacgctgcctttgtacggcatacgacctaaccagtcgtaacccatttcaaagccaacatacgggttaacctggtaaccaccaaaagcaccagcgcccagttggttttcatgggtcgggccattgttgttgatgaaaccagtgtcatggtactgggaccagcccagtttagcaccagtgtaccaggtgttatctttcggagcggcctgcgctacggtagcgaaaccagccagtgccactgcaatcgcgatagctgtctttttcattttttgcgcctcgttatcatccaaaatacgccatgaatatctccaacgagataacacggttaaatccttcaccgggggatctgctcaatattaactctaccgatatcttcggcttatgccgagcacccctggcgatgtaaagtctacaacgtagttgaaaacttacaagtgtgaactccgtcaggcatatgaaaaaaaagtcttgtataaggtatgtttaatcttttttgtcagcgacaatttacagaagagaatcgcggaaaccgcttcagacaagcctccgcaaggaaaattagtcacgactgaaagcattggctgggcgacaaaaaaagttccaggattaatcctaaatttacttaatgatacaaattagagtgaatttttagcccggaaagttgtctcgtggcgtgagaggatgcgcttaccggacgcataataaaccccatagcgttaccttcatttgccgcatcaacaagttcagcatgctcttcttcagtcaaatcatctgccaaccaaccgatcaccacactgtaattgcccgtgcgtaaagcgcgaaccatactctccacagtgtggcaaggggagagctggctaatctgcattactttcgttaagggtagcccagatgcctgaacccattcccgactcagtttttgttgcggtgttaaccagagttgccagcggctttgctgaccgagttgctgtaacaatggcaacagtagaagttgcgtcatcatgggctgatcttcgcgatagacaacttcactgataagcccggctgtagtgttttccgtagagacacgcgcaattttacttgctgcggaactgaagctgctagaacgatgtgcatagccactagtgtacataatcaatccagcccctgtgagttactgtatggatgtacagtacatccagtgacaacaaagatcaaccctattttcggaaagagcctcgcaaattttgtcgttggtgacgggaaaacataaattaatcttgccccttaagaataagttgcctattttcgtagttaacggatccgttaatgtgaatcattcttttatgttatgattttaaaaggaattttatgaaaagcctctcctataagcggatctataaaagtcaagaatacctggcaacgttgggcacaattgaataccgaagtttgtttggcagttacagcctgaccgttgacgacacggtgtttgcgatggtttctgatggtgagttgtatcttcgggcttgtgagcaaagtgcacagtactgtgtaaaacatccgcctgtctggctgacatataaaaagtgtggccgatccgttaccctcaattactatcgggttgatgaaagtctatggcgaaatcaactgaagctggtgcgtctgagcaaatattctctcgatgcagcgctgaaagagaaaagcacgcgcaatacccgggaaagactgaaagatttgcccaatatgtcttttcatctggaagcgattctcggggaggtggggattaaggatgtacgggcgttacgtatacttggggcaaaaatgtgttggttgcgactgcggcagcaaaacagtctggtgacagaaaagattctgtttatgcttgaaggtgccattatcggcattcatgaagctgcgctcccggtggcacgccgccaggagcttgcagaatgggctgactctcttacgccgaaacaggagtttcctgcggaacttgagtaattacgcgctaacaggagtttcctgcggaacttgagtaatctggcgttgcagacgaccaatctcaggcagtaatgcaatcaataatccaacttgttgtacgaccagaggttctttgctgtctgcccgtggttcaagttgctgcatccgctgtttcaggctagctaatgcctcattgacgcgttcttcatcagcaggttgatgatgtaacgcgtcatcaacatagcaaactgcgtcatcaagaaacgccagaatttcaggattagttaactgctcccggtgagcaccgagggcactgatatagctggtaaacgtatggttaaggcacagcaaccgaaacgcggcttcgcgaatttgcggggtaacgttcggctcgctggacatattacttaccacgctcgccagctcagcatcacggttgtgtgcatcgcggcgggcaatacgatacgccagacggttatcacgcccctgatggtattgctccagtatggcatcgagataccgacagttggcctctgtggcacgttcgagcatgcgcggcagattgcgaaactgccagtcaggccagatgtagctcactgccgcccacgcaatggcacaaccaatcagcgtatcgattacgcgaggtaacgctacttcaaaaccttcacccagtaagttaaaacacagtagcaccaaaagtgtgatgaacatcgttgcatgagcgtattgcacgttacggaaggcaaaaaagagcacgccggtaataaccagcagcaccagctgcccttccagacttggcacaaaccacagcacaggaatgccaatggcgatacctaccagcgtaccaataatccttaacttcaggcggtggcgcgtggcgttatagtttggctggcagacaaacaaacttgtcagcaagatccaatacccgtgatgcattccggttatctgaatgatggcgtagccgaagcacaacaccaggctcattcttaccgcatgacggaagagggcggattccggcgtgaagtgacggctaagacgcagccagatatcactcaacccgtgcgggctgtcatcagcgagctcattttcgtcattattatggggtagtgcctgggcctgttcactttcaattgttgccagttgggcatcaatggcgcgtaaattgttcagcaaaaatcccagtgttttgagtaaatcggcgggtgcgccgttatcgcgcatccgctccagcgcagcatcaatatgcgtaaaagcgcgctcaaaatgcggatcatgttgataaggctgacgcaacaaaatacagcgactcagttgctggcacgcctggccctgcatgctcatcagccgctgaaaacggaacagcacgtcgctgtggcgaaaatgttcacgcaatgtttgatactgaatatgagaagagctggcacgctcgtgaatatcctgtgcgacaaagtaataatgcagcgtgcgacgcgttccccgttgaccacgatcgccacgtaagcgggtcagcaggctgagtttcgtctgattcaatgtcgccatcagcagaccgttggcgagagccaaatcgtacagcggtgcctggctttgatcttcaatatcaggatcaaacatgcggctcttgagctcaagataacgcgccagttgttcatagcaacgcgccaggttgtcctgcagcgggcggaccgggaacagcagatgaccaataagtgtcaggacgttgtaccagacggcaccggccagcagatacatcggctgctgataccagtgctcatacagacttgttcccaacatagtgtaaatggcgatcagcaatgcaccgaaggcaattgttgcatagcgttgacccagaccgccgagcaaaatgaagccgctggtagagagcgttaagccaatcgcaaatagccagggccagggaaacagcaattctacactggcgctggcgataaaaaagcagaacagcgtaatgatgaggttacgcaaacgtcccgccagtcggtcatcgagatcggtcagcgccgctgccaccatccccagcgttagcggaatcgtcagttttacatcacccagccaccacggaaacgctgtggttccacaaagcgcaataaaaatacgcgcgtaatacagccaggcgctgttccaggtatagcgtttgagcaaaggacttagcataaaggccatattagtggattattcaaaacgacgacgtgcattggcttcacgcgcagcttgcgctgtttctacgcttaccacgcgacgaccaaccggccatagtgcaatagcggcaattttaaagttcgcaatgccgacaggaatgccaatgatactaatacattgtgcgatgcccgttgcaatgtgcatcaggcataaccaccagccaaagaaaatcagccagaaaatattcaataccgtaccgccagtattcagcagcacatttttgccagccgggttcagttcatcgacatgaatagcttcattgccataaggcaccagagacagtttagtgatctcccagcaggatcgtgtcagcggtaaggtaaaaatcagcacaatactgaccagagtcgccaacagccagcccagagtggtggcaaatccgccaagcacaaagttcagaatgttcaaaacggtacgcataaaacctcgctttactgtggttttcagtaatgggcggcaattgtaacgtttttttgggctggagcacgttttctctgacggttacactgataagaaataatttcgtgtggatctacagagtcatggaactgaaagcgacaacgcttggaaaacgtctggcacagcacccttacgatcgggcggtgatcctcaatgccgggattaaagtctccggcgatcgccacgaataccttattcctttcaatcaattactggcgattcactgtaagcgcggtctggtatggggcgagctggaatttgtactgccggacgaaaaagtggtgcgtctgcacggcaccgaatggggcgagacgcagcgtttttaccatcatcttgatgctcactggcggcggtggagtggcgagatgagcgaaattgcgtctggtgttttacgccagcaactggatttgattgccacgcgcactggggaaaataaatggctgacgcgtgagcaaacctctggcgtgcagcaacaaatccgccaggctttgagcgcgttgccgttgccggttaaccgactggaagaattcgataactgccgtgaggcgtggcgtaaatgtcaggcctggttgaaagatattgaaagcgctcggttgcagcataaccaggcgtataccgaagccatgcttaccgagtatgcggattttttccgccaggtcgagtctagtccgctgaatccggcgcaggcccgggcagtcgttaatggcgagcattctctgttagtgctggcaggtgcaggaagcggaaaaacgagcgtgctggtggcccgtgcaggctggttgctggcgcgtggtgaagcgtcccctgagcaaattttattgctggcgtttggtcgcaaagccgctgaagagatggacgagcggattcgcgaacggctacataccgaagacattaccgcacgcacgtttcatgcgctggcgctgcatattattcagcagggcagcaaaaaagttccgatagtcagcaaactggaaaatgataccgctgcccgtcatgaactctttattgctgagtggcgcaagcaatgcagcgaaaagaaagcgcaggcgaagggctggcggcaatggctgacggaagaaatgcagtggagtgtgccagaaggtaacttctgggatgatgaaaaattacagcgtcgccttgcctctcgcctcgatcgctgggtaagtctgatgcggatgcacggtggtgcacaggcagaaatgattgccagtgcacccgaagagattcgcgatctgttcagtaaacgtatcaagttgatggccccgttattaaaagcctggaaaggtgcgctgaaggcagaaaacgctgtcgattttagcggccttattcatcaggcgattgtgattctggagaaaggtcgctttatcagcccgtggaagcatattctggttgatgaatttcaggatatcagcccgcagcgggcagcgttgttagcggcattacgcaagcaaaacagtcagacgacgttgttcgctgttggtgatgactggcaggcgatttaccgattcagcggtgcgcaaatgagcctcaccaccgctttccatgaaaactttggtgaaggcgaacgctgtgatttagacacgacttaccgttttaacagtcgtatcggtgaggtggcaaaccggtttattcagcagaacccaggccagctgaaaaagccgctaaacagcttaaccaatggagacaaaaaagccgtcacgttattggatgagagtcaacttgacgctttgctggataagctctctggttatgccaaaccggaagagcgcattctgatcctggcgcgttaccatcacatgaggcctgccagcctggaaaaagcggcaacacgctggccgaagttgcaaatcgactttatgaccattcatgccagcaaagggcaacaggcggattacgtcatcatcgttggcttgcaggagggaagtgatggttttccggctgcggcgcgggagagcattatggaagaggcgctactgccaccggttgaggatttcccggacgctgaagaacggcggttaatgtacgtggcgctgacccgggcacgccatcgggtatgggcactgtttaacaaagagaatccctctccctttgtggaaatactgaaaaatctggatgtgccggtggcgagaaaaccgtaagaaacaggtggcgtttgccacctgtgcaatattacttcagacggtccgcgagataacgctgataatcggggatcagaatatcgaccgcgtcgttgaaatgcgggctctggattatgaagtctgccgttgccacgttggtggcgaccggaatgttccataccgtcgccagacgcagcaaggctttcacgtcaggatcgtgcggcacggcatttagtggatcccagaagaaaatcaatacatcaattttcccttcactgatcaatgcgccaacctgctggtcaccccccattgggccactcaacatcgcgttgacgttcatgccggtcgcgcgggaaattaagttaccggtagtgcctgttgcatacagtacgtgttgttccagtaacggttgatgccgttccacccagctcatcagcatttgtttgcagtgatcgtgtgccaccagcgcaatatgtttccgcgcaggtaaagtgcgagtcgtcagttccataatgtacatccgtagttaactttcctacagattactgtaagcacttatcgctgcaagataaagaccgaaaaagcctgcgcacaggcacaaaaatctcaggaagatggttgtttttccgcccactgcaggaaagtatttcgcgtttgtgggtcagccagtttaaaccaatacttcagccgttgttctgtgagcacctgagactgcggtggaatagcatccagctcggaaacaccgctaagcagcgtactgtcatctgccatcatcgtggcaaattgcggtagactagcgcgtttcgcggatttgttatagcgttcaacctcgacctcataatcaatcgtttttgccgtactggtaatggcgagaatatccagctttaccggaatcggcgtcgcatcgccatccaacaattcaaggcgcggcgcggcatcaaaatggttagcttcccgctcattctccaggcgaggcaggcgaaaattgacctggttgatgagctgggtattaaaactgaccaccagcggtggggagatatacagccgttcttcactattggaaagatgaatcgtcttctcaacgcgaaacactaactgatgcggtccattatccagttcaatgctgtccgcaccgcgcagcagagagctggaaaccttcttgccgtcgagtaccagaagatcgacatcggtactaagccgcagcgtggtggcaaaaacggataccggcaaacataatgcaatcaaggtggtcacgatgccggttttcataggtagctcctgtcaaaagaccgcccgaataataatgtgtcaaaatttttctttaatcatacttactaacatatagacatatttcccgcttttgctctcattcattcgtattagctgcatggttggcatgtcggctttgtcgtacactttgttaaacagtctggaggaaataatgaaagaaaccgatattgcaggcattttaacgtccactcacaccattgcgctggtgggggcaagcgacaaacccgatcgtcccagctatcgcgtgatgaaatatctactcgaccaggggtatcacgtcattccggttagcccaaaagttgccggcaaaacgctgctgggccagaaggggtatggcacgctggcagacgttccggaaaaagtcgatatggtcgatgttttccgtaatagtgaagcggcgtggggcgtggcacaggaagctattgccattggcgcgaaaactctctggatgcaactgggggtgattaatgagcaagcggcagtactggcacgggatgccgggttaaatgtggtgatggatcgctgcccggctattgagatccctcgcctgggcctggccaaataaaaaatccccggaaggcaaaaaccttccggggatttgttcagggattagttacgcagacgcggggcctggagttgtttgcggatggtctgcgccagctcatccatggatggctgttcaggatgttcatcctgcaattcgctacttagctgggcttcagccaggtaggtatgaaccggtaggccgttatcgtcctccatcactacgtgataccacggagcggcgcgaagctcgtcattcaccgccagctcatcagggctcggttcagagaggctataaaccgggtcgatatccacgaccactccgagataacctaacagggaatggcggacctgctggccgataccgaatttgctggcaatcatagtcacctcccgggaaatctttacctttgatataagggtaaaattccacatttcaagttacatgacgcgacaggcaaaccctttcagatatagcccttccggataggtagcgatcaccggatgatcggctgcctgacggaactgctctataaattgtacatcacgaccggcatcaattgcggcatccgcgatgattttctgaaataaatcgctggtcatcagaccggaacaggagaaagtcaggagaataccgccttcattcagcagctgaatcgccagcatgttgatgtctttataaccacgacacgcgcccatcaactggcttttattctcaacaaacttcggcgggtccatcacgataacgtcaaatttttcaccgcgatcgcgataagtacgcagcaatttaaagacatcatcacggacaaactcagccttgctcagatccagtttgttcagctcaacgttctgccgtgcaatatccagcgcttcctgggaggtatcaacgctgacaacctggctgcaaccgcccatcagtgcgcttacggcgaaaccaccggtataggagaaacagttcagcacacgtttattttcaacgtagcggcgggtagccaggcggctatcacgctggtccaggtagtagcccgttttgtgtccgtgctgaatatccaccagcagtttcattccgtgttcttcaatcggcagcagggcaggtggcaactcgccggtgacggggccctgggtcagctccattccttcttttttacgtaccgcgacgtcgctgcgatcgtaaatgctacattccgggtacagcgtttgcagggcactaattaatgccgcgcgctgatattctgccccagcactcagcagttgcagcaccagaaaattaccgaaacgatcgatagtaatacccggcaggccatcagattctccggcgattaaacgatagctgtcgaggccatctttttgcgccagccagtcacgccatttttgtgcttgttgcaaacggcgggaaaaaaaagcaatgtcgatagactcagacgggtcaaacgtccagacgcgcgcccggatttggctagctgggctataagcgccgcgtgctaaccattttccctgatgatcaacaatatcgatggtttcaccgaggctggctttaccttccatgcgggcaacggccccggaaaagacccacggatggcgacgaagtaatgatttttcgcgccctttggctaacactaaacgtacactcataatttacttttctgtcgatgcaaagaaatgggcgtcattgtccggagttttccatggatttgcaacgcgtccattaaggataaggagagcagcaatgagcaaagtctgcataattgcctgggtttacgggcgagttcagggcgtaggatttcgctacaccacacagtacgaagcgaaaagactgggtttaaccgggtacgccaaaaatcttgacgatggcagcgtggaagtggttgcttgcggtgaagaagggcaggtggaaaaattaatgcagtggttaaagagtggcggcccgcgttctgcgcgtgtagaacgggtgctcagcgagccgcatcatcccagcggggaattaaccgattttcgtatccgttaaatacattttaccggttttggcaggccagcaattttggtggcttgcttagccggacctttcggaaacagtcggtataaatagcggctgttacctttttcttcgccaaatttattcgccatcgcttttaccagcatacgaatcgccggagaagtattgaattccagatagaaatcacgcacaaaacgcaccacttcccagtgttccggactcaggctaatcccttcgttctctgcaatcaccacagccagcggctcactccactggctgctttctttgagatagccttcggtatccgtttctatctctttaccttcgaagatcagcataattattactaccttaatcagactggcggcagtgtaacaaaaaacaaagccccgcataaagcgaggctatgaaagtgttagcgggtgagattaatcgcggctagcgaagcccagaatgctcagcaggctgacgaagatgttgtacaggctaacatacaggctaaccgtggcacgaatatagttcgtctcaccgccatgaatgatgttgctggtttcaaacaagatagcgccagaggagatcagaatgaagaccgcgctgatcgccagatgcagagcaggcagctgcaggaagatattcgcaaccataccaatcagcaccaccacaatacccgccatcagcataccgccgaggaagctcatatctttgcgggtggtcagcacatatgcagagcagcagaagaacactaacgccgttccgcccagtgccatagcgattacgtcacccattccggcagacagataggtgttcagaataggtccgaggatataacccagaaaaccggtaaaggcgaatgcggagataatcccggtcggcttattcgccgttttataggtcaggaacatcaaaccatacatacccaccagcgtcagaatcagacccggagatggcagcatcagcaccgtactggcagttgcggtaatcgcgctaaaggccagcgtcaggctcagcagaaaataggtattacgcagcaccttatgggtgctaagcagacttgtacggtcatgactagaactaacaatacgatccattgagtcactctctatgacagatgtaattaattaagcagcataatgataatgcgtaagggcacccagaagttttacccatctttacgcatttgatctggaacaggtttaacagcggattatcaggtcattaagcaaatataacgccctgagaatttcgacaggcaaaagaaaaaggggttagcatttagctaaccccttatcttatttggcggaagcgcagagattcgaactctggaaccctttcgggtcgccggttttcaagaccggtgccttcaaccgctcggccacacttccggaatgacgcgcactataaacatcccgatgcggcgtgtaaacccctaatttgtttgtttgcctgaaaaacagccaaaagtgcattgatagcgtgaaataacagcagattgatcatttcatcaccatgaattccttctcttttactcgtttagcaaccggctaaacatccccaccgcccggccaaaagaaaaataggtccatttttatcgctaaaagataaatccacacagtttgtattgttttgtgcaaaagtttcactacgctttattaacaatactttctggcgacgtgcgccagtgcagaaggatgagctttcgttttcagcatctcacgtgaagcgatggtttgccttgctacagggacgtcgcttgccgaccataagcgcccggtgtcctgccggtgtcgcaaggaggagagacgtgcgatatgaataacgaggaaacattttaccaggccatgcggcgtcagggcgttacccggcgcagctttctcaaatattgtagtctggctgccacgagcctgggattaggcgcgggaatggcaccaaagattgcctgggcgctggagaacaaaccgcgcattccggtggtatggatccacggtctggaatgcacctgctgtaccgaatcttttatccgctccgctcacccactggcgaaggacgtcatcctttccctgatttccctcgattacgacgatactttgatggctgccgccggaacccaggcggaagaagtctttgaagacatcatcacgcaatacaatggcaaatatatcctcgcagtagaaggtaatccgccgctgggcgagcaggggatgttctgtatcagcagcggtcgaccgtttattgagaaactcaaacgtgccgctgccggagccagcgcgattatcgcctggggaacctgcgcgtcctggggctgcgtgcaggccgcgcgacccaatccgacgcaggcaacgcctatcgacaaagtcatcaccgacaaacccattatcaaagtacctggctgcccgccgatcccggatgtgatgagcgccatcattacttacatggtgacctttgatcgcttgccagatgtcgacagaatgggccgtccgctgatgttctatggtcagcgaatccacgataaatgctatcgccgcgcccacttcgacgccggagagttcgtccagagttgggatgatgacgctgcccgcaaaggttactgcctgtacaaaatgggctgcaaagggcctaccacctataacgcctgttcctccacacgctggaatgatggcgtttctttcccaatccagtctggtcacggctgcctgggctgtgcggaaaatggtttctgggatcgcggtagcttctacagccgcgtggtcgatattccgcaaatgggtactcattccaccgccgataccgtcggtttaaccgcgcttggcgtggtggcagcggctgttggtgtgcacgcagtcgccagcgccgttgaccagcgcagacgtcataaccagcaacctacagaaaccgaacatcagccaggcaatgaggataaacaggcatgagcactcagtacgaaactcagggatacaccatcaataatgccggacgccgcctggtggtcgacccgattacgcgcatcgaaggccacatgcgctgcgaagtgaatattaacgatcagaatgtgatcaccaatgccgtctcctgcggcaccatgtttcgcgggctggagatcatcctacaagggcgcgacccgcgcgatgcgtgggcgttcgttgaacgtatctgcggcgtctgtactggcgtacacgccctggctagcgtttacgccatcgaagatgctatcggtattaaagtgccggacaacgccaatatcatccgcaacattatgctggcaacgctctggtgccacgatcatctggtgcacttctatcagcttgccgggatggactggatcgatgtgttagatgcgctgaaagccgacccgcggaaaacctccgaactggcgcaaagtctctcctcttggccgaaaagttcccctggctatttcttcgacgtacaaaaccgcctgaaaaaatttgttgaaggcgggcagttggggatcttccgcaatggctactgggggcacccgcagtacaaactgccgccagaagctaacctgatgggctttgcccactatctcgaagctctcgatttccagcgtgaaattgtcaaaatccacgcggtctttggcggtaaaaacccgcatccaaactggattgtcggcgggatgccttgcgccatcaacattgacgaaagcggcgcggtcggggcagtcaatatggaacgcctgaacctggtgcagagtattatcacccgcacggcggacttcattaacaacgtgatgatccccgacgccttagccatcggtcagttcaacaaaccgtggagcgaaatcggcactggtctttctgataaatgcgttctcagctacggcgcattcccggatattgccaacgactttggcgagaaaagtctgctgatgcctggcggcgcggtgattaacggcgacttcaacaatgtgctgccagtggatttggttgatccgcagcaggtgcaggagtttgtcgaccacgcctggtatcgatatcccaacgatcaggtcgggcgtcatccgttcgatggcatcaccgacccgtggtacaaccccggcgatgtcaaaggcagcgataccaacattcagcagctgaatgaacaggaacgctacagctggatcaaagcgccacgctggcgcggtaacgcgatggaagtggggccgctggcgcgcacgttaatcgcttatcacaaaggcgatgctgcgaccgttgagagcgtcgatcgcatgatgagcgcgttgaacctgccgctttccggtatccagagtacgttaggccgcattttgtgccgcgcgcacgaagcgcagtgggccgcaggtaagttgcagtatttcttcgacaagctgatgaccaacctgaaaaacggcaatctcgccactgcttccacggaaaaatgggaacctgcaacctggccgacagagtgccgtggtgtcggttttaccgaagcgccgcgcggggcgttaggccactgggccgccattcgcgatggcaagattgatctctaccagtgcgtggtgccgaccacctggaacgccagcccgcgcgatcccaaagggcagattggcgcttatgaagcggcgctgatgaacaccaaaatggcgatccccgagcaaccgctggagatcctgcgtactctgcacagctttgacccgtgcctcgcctgtagtacacacgtgctgggcgacgacggtagcgagctgatctccgtgcaggtgcgttaacagcgaaggagaatcatcatgcaacagaaaagcgacaacgttgtcagccactatgtctttgaagcgccagtgcgcatctggcactggttgacggtgttatgcatggcggtgttgatggtcaccggatactttatcggcaagccgctaccttccgtcagcggcgaggcgacgtatctgttctatatgggctacatcaggttaattcacttcagcgccgggatggtttttaccgtggttttgctgatgcggatctactgggcttttgttggcaatcgatactcccgcgagctgtttatcgtgccggtatggcgtaaaagctggtggcagggcgtgtggtatgaaatccgctggtatctgtttctggcaaaacgtccgagtgccgatataggccataatcccatcgcccaggcggcgatgttcggctatttcctgatgagcgtctttatgatcatcactggttttgcgctgtacagcgaacacagccagtacgctatttttgcgccgttccgttatgtggtggaatttttctactggacgggtggcaacagtatggacattcacagctggcatcggctggggatgtggctgattggcgcgtttgtgatcggtcatgtctacatggcgctgcgtgaagacatcatgtccgacgacacggtgatctccaccatggtcaacggctaccgtagccacaaatttggcaaaataagtaacaaggagcgtagttgagctaaataagtaacaaggagcgttcatgagcgagcaacgcgtggtggtcatggggctgggcaacctgctgtgggccgatgaaggcttcggcgtgcgggtggcggaacggctgtatgcccattaccactggcccgagtatgtggagattgtcgatggcggtactcagggactgaacttgctggggtatgtcgaaagcgccagccatctgttgattctcgatgccattgactacgggctggaacctggaacgctgcgaacctatgccggagaacgcattccggcttatctcagcgcgaagaaaatgagcctgcatcagaacagtttctccgaagtgttggcgctggcggatatccgcggacatctgccagcacatattgccctcgtcggtctgcaacccgcaatgctcgacgactacggcggtagcctgagcgaactggcacgggagcaactgcccgctgcggaacaggcggcgctggcgcagcttgctgcgtggggaattgtgccgcaaccggctaatgaaagccgctgtctcaattatgactgtctgagcatggaaaattacgaaggcgttcgcttgcgccagtaccggatgacacaggaggagcagggatgagcaacgacacgccatttgatgcgttgtggcaacgaatgctggcgcgcggctggacgccagtcagtgaatcccgtcttgacgactggcttacgcaagcgccagacggcgtggtgttattaagcagtgacccgaaacgcacgccagaggtcagcgataatccggtaatgattggcgaattactgcgcgagtttcccgactatacatggcaggtggcgattgctgaccttgagcagagcgaagccatcggcgatcgctttggcgtctttcgctttcctgccactttagtgtttaccggcggaaactatcgcggcgtgctgaatggtattcacccgtgggcggaactgataaacctgatgcgcgggcttgtcgaaccgcagcaggagcgtgccagttgatctaaccgcagcaggagcgtgcctcatgagcgaaacttttttccatctgctggggccaggaacgcaaccgaacgatgacagtttcagcatgaatccactgccgatcacctgtcaggtgaatgatgaaccgagtatggcggccctggagcaatgtgctcacagcccgcaggtgattgcgctgttaaacgagttacaacatcaactaagcgaacgccaaccgccgttgggcgaggtgctggcagtcgatctgttaaatctcaacgccgacgatcgtcactttatcaatacgcttctcggggaaggggaagtgagtgtgcgcattcagcaggctgacgacagtgaaagtgaaatacaggaggcgatcttctgcggattatggcgggtgcgcagacgtcgcggcgaaaagttgctggaggacaaactggaggctggctgcgcgccgctggcgttgtggcaggcggcaacgcaaaatctcttgccgacagatagcctgttaccgccgcccattgatggcctgatgaatggcctaccgttggcgcatgagttactggcacatgtacgtaaccccgacgcgcagccgcacagcattaatctgacgcaattacccatcagcgaggctgatcggctttttctcagtcgtctctgtgggccgggaaatattcagattcgtaccattggctatggcgagagctatatcaacgccacggggttacgccatgtctggcatttacgctgtacggacaccttaaaaggcccgttactggaaagttatgaaatctgcccaataccggaagtggtgctggcagcgccagaagatttggtcgactctgcgcagcggcttagcgaggtatgtcagtggctggcggaagctgcaccgacgtaaaaagacggtaagtatcgctttcagtcttatgaatatcgcaatcggcgaatacctctggtcgtagagtttcaggataaagagggagatctaccattatcgggttatttttctctcttcgcctacaggagtgcgcatgtgggatgtcattgatttaagccgctggcagtttgctctgaccgcgctgtatcactttttatttgtaccccttaccctggggctgatttttttgctggctattatggaaaccatttacgtggtcaccggcaaaacaatctaccgcgatatgacgcgcttctggggtaagctcttcggtatcaattttgctcttggcgtggctaccggcctgaccatggagtttcagtttggtactaactggagtttctattccaactatgtgggcgatatttttggcgcaccgctggcgatggaagcattaatggccttcttcctcgaatccacctttgtcgggctgttcttcttcggctggcaacggctgaataaataccagcacctgctggtgacgtggctggtggcgttcggtagtaatctctctgcgttgtggatattgaatgccaacggttggatgcaatacccgaccggtgcgcattttgatatcgacaccctgcgtatggagatgaccagcttcagcgagctggtctttaatccggtcagccaggtgaaatttgtgcacaccgtaatggcgggctacgtgaccggggccatgtttattatggcgatcagcgcctggtatttactgcgcggacgggagcgcaatgtcgcattacgcagctttgccatcggttccgtcttcggtactctggcgattatcggtaccctgcaactcggagacagttctgcgtatgaagtcgcgcaagtacaaccggtaaaactggcggcgatggaaggggagtggcaaacggaacctgcacctgcaccgttccatgtggttgcctggccggaacaggatcaagagcgtaacgcctttgccctcaaaattcccgcgctgctagggatcctcgccactcacagtttagataaacccgtgccgggtctgaagaatttgatggctgaaacctacccacgcttgcaacgcggacgtatggcctggctgttaatgcaggaaataagccaaggcaatcgtgagccgcatgtgttgcaggcattccggggactggaaggtgacctgggctacggcatgttgctctcccgctatgcgccggatatgaatcatgtcacagccgcacagtaccaggcggcgatgcgtggcgcgatacctcaggttgcgccggtattctggagtttccgcatcatggtgggctgtggttccctgctgctactggtgatgctgattgcgcttgtccagacgctgcgtggcaaaatcgaccagcatcgctgggtgctgaaaatggcgctctggagtttgccgttgccgtggattgcgattgaagccgggtggtttatgaccgagtttggtcgtcagccgtgggcgatacaggacatcttaccgacatactccgcgcactccgctttaaccacaggacaactggctttcagtctgatcatgatcgtagggctttacaccctgttcttaatcgccgaagtctacctgatgcagaaatatgcccgtctggggccgagcgcgatgcagagtgaacaaccgacgcagcaacaggggtaaaggagaaaatcatgtttgattatgaaacattgcgcttcatctggtggctgctgattggcgtgatcctggtggtctttatgatctccgacggatttgacatggggatcggctgtctgctgccgctggtggcgcgtaatgatgatgaacgccggatagtgataaacagcgttggtgcacactgggaaggcaaccaggtctggttgatcctcgctggtggggcattatttgccgcctggcccagagtgtatgcagcggcgttttccggcttttatgtggcgatgatcctggtgctgtgcagtctgttcttccgcccgctggcctttgattatcgcggaaaaatcgccgatgcacgctggcgtaaaatgtgggacgccggtctggtcatcggcagtctggtgccgccggtagtcttcggtatcgccttcggcaacttgttgctcggcgtgccgtttgccttcacaccgcaattacgcgtggagtatctcggcagcttctggcaactgctgacgccattccctttattgtgcggattgctcagccttgggatggtgattttgcaaggtggcgtctggttacaactgaaaactgttggtgtgattcatctgcgtagtcagctggcgaccaaacgcgctgcactgttggtgatgctgtgctttttgctggcgggttactggctgtgggtcggtattgatggctttgtactgctcgcccaggatgctaacggtccttccaatccgttaatgaaactggtggcagtgctacctggtgcctggatgaataattttgtcgagagccccgttttgtggatcttcccgctgctgggattcttctgcccattgctgacggtgatggcgatttatcgtggtcgcccgggttggggatttttgatggcaagtttgatgcaatttggcgtgattttcacggcaggcatcacgctgttcccctttgtcatgccgagtagcgtgagtccgatctccagcctgacgttgtgggacagtacttccagtcagctgacgctgagcattatgttggtaatcgtgctgatatttttgcccattgtgttgctctacactctctggagctactacaaaatgtgggggcgcatgacaacagaaactctccgccgtaacgaaaacgagttgtactaaggagcagaaacaatgtggtatttactttggttcgtcggcattttgttgatgtgttcgctctccacccttgtgttggtatggctggacccgcgtctgaaaagttaacgaacgtaggcctgatgcggcgcattagcatcgcatcaggcaatcaataatgtcagatatgaaaagcggaaacatatcgatgaaagcgatcttaatcccatttttatctcttctgattccgttaaccccgcaatctgcattcgctcagagtgagccggagctgaagctggaaagtgtggtgattgtcagtcgtcatggtgtgcgtgctccaaccaaggccacgcaactgatgcaggatgtcaccccagacgcatggccaacctggccggtaaaactgggttggctgacaccgcgcggtggtgagctaatcgcctatctcggacattaccaacgccagcgtctggtagccgacggattgctggcgaaaaagggctgcccgcagtctggtcaggtcgcgattattgctgatgtcgacgagcgtacccgtaaaacaggcgaagccttcgccgccgggctggcacctgactgtgcaataaccgtacatacccaggcagatacgtccagtcccgatccgttatttaatcctctaaaaactggcgtttgccaactggataacgcgaacgtgactgacgcgatcctcagcagggcaggagggagtattgctgactttaccgggcatcggcaaacggcgtttcgcgaactggaacgggtgcttaattttccgcaaagtaacttgtgccttaaacgtgagaaacaggacgaaagctgtagtttaacgcaggcattaccaagcgaactcaaggtgagcgccgacaatgtcagtttaaccggtgcggtaagcctcgcaagtatgctgacggagatatttctcctgcaacaagcacagggaatgccggagccggggtggggaaggatcaccgatagtcaccagtggaacaccttgctaagtttgcataacgcgcaattttatttgctacaacgcacgccagaggttgcccgcagccgcgccaccccgttattagatttgatcaagacagcgttgacgccccatccaccgcaaaaacaggcgtatggtgtgacattacccactagtgtgctgtttatcgccggacacgatactaatctggcaaatctcggcggcgcactggagctcaactggacgcttcccggtcagccggataacacgccgccaggtggtgaactggtgtttgaacgctggcgtcggctaagcgataacagccagtggattcaggttagcctggtcttccagactttacagcagatgcgtgataaaacgccgctgagtttaaatacgccgcccggagaggtgaaactgaccctggcaggatgtgaagagcgaaatgcgcagggcatgtgtagcttggcaggttttacgcaaatcgtgaatgaagcacgcataccggcgtgcagtttgtaatgcataaaaaagagcattcagttacctgaatgctctgaggctgatgacaaacgaagaactgtctaatgcgtagaccggaaaaggcgttcacgccgcatccggccactttcagtttgcaatacgtacgcttgagatcaggattgtctactttgagtataacatccttgtgaaatctccctttcctcataccgcttgcactatatactgcgggtaggaaaggcgcgcagagggaaatataagattgttaactatccccctctggaaatacgacttgtgagcataagataaatcttagcaaaatacaaattaaagataaggaaattgttacgaaagctattaattattgttggtaatatagtttcaagtggtactataactggctgttaaatggcatttataactattaggtgcagagatattcgcttaaatggattagtttctttgtggaaaagtaactgatgttataatgtatgatgttgactatttcactattccaataaaaccagtcagctttaaacaagcagcgtcatattaagagagataaacatttgccgctgttggtcctcgcaggccatttacgcggcaaaattccacacgtaatcctggtataagcacttctgcgtcgcggggagtgaatgcggaaatatggacctgaacttctttacgaccgtcggaggggataatgaatcctttgccgcttttgcgatcaaaggttttgacaattcctgtcattttacgggacaaacaaattccttactgaaaatactgcgctgcactatacggggttaataaaataaagccagcgatatttaagaccgccggacggctaaaataaaatttgcttaatctcaattatcatgcgttaatagctgcgtcggtttgaaagacagacagcatacaaagtagtttactaaagcagttctcattatcaggcattatccccttcttttgagtctctctcctgaacactaagtagtttctgtattaaagccctgtttgccgaaaggcccaaaatgaaggaagtaaaatatgtctaataaaatgactggtttagtaaaatggtttaacgcagataaaggttttggctttatcactcctgatgatggcagcaaagacgttttcgtccatttcaccgccatccagagcaatgaattccgcacgctgaacgaaaatcagaaagttgaattttctattgagcaggggcaacgtggccccgcggcagcgaacgttgttacgctctaaggttgccattattactcaacatctccatttccgctgtccatgttgtcatggttcacagtaccgcacatcggcattcgatgtgacggagcgaaaccctttgggcgctaagtgtattttttgtaaatcgacgatgatcacctttgataacgtcgcgctgcaaatacgcactgaccatgcgccgctggattagtcaaaataatatcaggctccctcgtggagccttttttatatctgccttatttttcttcaacgctgtatgtatagtaagcgataacctgttgattattgaatctttcggggagatggcttataacatttcttacctgaccagggtaccgggaaccaacaccttactggcgtgttgctgtcttttaagaccagaagaggttaacagtgaatattgaagagttaaaaaaacaagccgaaacggaaatcgccgactttatcgcgcaaaaaatcgccgagctgaacaagaatacagggaaagaagtctctgaaattcgcttcaccgcacgagaaaaaatgaccgggcttgaaagttatgatgtcaaaatcaaaataatgtgattttgtgaacatcaccccgtgcgaggtgatgttccgcttgttgctaatttagtgaccaatcattggcgcttgtggaattaagcgtcggtacaattcctccggcaccgggctttgccatactcccgcatacattgcgtaaccaatcaccgcaaacataatccccagaaccagtagcgtcattaaccagccagacaacgcaaaggcttttttatttgccgcaggtttttgcagactaaaggtcaatgtactggctaccggacaactctctacgcaagtcatacagccggtacattccactgttcgtacctgaattaatttatcgaccgggatccgacttgggcaattttttgcgcatttgccacagtcgatacaactttcggcattgcgacgaatcttaaacgggctcaataggctaaccacgcccatcagcgcgccatatgggcaaagataacgacaccaggcatggcgaataaacaggctggcaatcagcaaaacggtcacgctgattaatgtcgcggtccccatatgacgaaagaaatcgagcattttaacgtccatcaccacgctgtaggggctcaacataaaatagtgaatcgcctgagcgggcatcaataacgcgatatagataaaaaaactcaacagcaaatacttcacgccgcgcagaggaatatccagccagcggggaaggacacattgccgaccaaacagtttgttaccgagatcgccgattaattcagaaagcgtaccaaccgggcataaccaactgcaaaaggcctttttgagtaatagactgatgacgataaaagcgaccaataacagcatcgcggcggcgtggacggacggtaactgacctgttacaaggctatatttcagattcatcagcccggcaatcggtagccagccttcgatacctcccggtctggcgacaaatgtcgtgctacttgccgtttcgtaatagcgcacccaataccagaacgtgatggcaatataaatattcattgccaacagtaataattgcgtcgctttacgccaggtcgtggcattacgccagtcattccacggtaatttgccgcccgtcgtgcctggccgccgctgccagcgggttcttttattctctgccatgattttgccagtccgttaagttgtataccaaatgccactattctagttgttcttaactggctgatattgattcaaatcgcgttcaggtctttcttatgcaaccatgcttccagagcggcaacactgcgtgtaatttcttcgtgtggaaggggggcagataatggctgctgctccagttgtgcgcatagctggctggcgatatgcattcccagactgctgcaactgctttttagctgatgcgcggcacgctttattttctcgctatcctgactggcgcgggcaatgtcgatttcatcgagaagcggcagggcatgttgtgtaaataataccagccattcgtggatcttctccgtccccattaactgagcatcttcattgagttggcttacatccaggctttgatcattattgacttgcagttggagatagtgcgccagtaactgaccgagcacttcacgcggcaccggtttagggataatcccgcggaataaactactggtacgctggcgcagcgtttcgtcaatgacatgggcgctaaagccaatcaaaaccaggctcggatattgctgtgccagttgtcgggcaagcgtaatgccgtcgatatccggcagatcaaaatccaccagtgcggcagcaaacggttcgctattttgcagtgtctctaaagcctgcgcggcattgccaacagcaacaatctgcgcaccactggttttcagcatctcaatggtaattcgctgggttagcgggttatcttcaattaacagcaaacgtaaaccgtcaagacgcaccgcctgattgactgtttttggcacgggtgccgtggcaacacgtaacggcaagcgtaaacaaaaacagcttccaacctccggcgtgctggtggcgctcagttcgccgcccatcgcctgggccagacggctactgatagtcagtcccagcccggtgccgccgcgtttgccgcttacctgcacaaatggctggaagatttctgccagtttcgcgggatcaataccgcagccgctgtcttccacttcgaccagccattgctcgccatcagtgcgactacgcaggataatgtacccttcgtcagtaaaacgcagggcgttgctcaacaggttggttataacctgacgaatacgtcgtggatcgcccattaacgcgcacggcatatcatcggcaattgccgttgccaggcgaatcgggcgacctttcacccgtccgctcattaattgcagggtactttccagcagcgggcgcggttcaaagggctcatcgctgacgctaacattcttgccacctgcttcgatagcggaataatcgagaatatcgttgaggatggtcagcaagctttcaccagagtcagtaattgcccgcaaatcatcacgctgggcgttaagtgcggggttatctgccagcagttgagcagtgccgagaataccgtacagcggtgtgcggatctcatggctcatcgccgccagaaacgcgctttttgcctggctggctttttctgcttccgcccgtgcctgtcggtgttctatcaccagttcctgcaattcagctgtacgcgctttgacctgcgccgccagctgttcgcggtggcgattcagtgcatgaacattgctgcgaaacgcatccatcagccgcccgatggtatccagctcccgtacgccagcggtttccgggaaaggggagtcaatatcaccgtccagcagccgttgcagcgcctgcgtttgttcggcaagtggacgcgtgacactgcgataaaccacgcgccagaggatcagaatcagtgcgcaaagactaaccatccccagcaataacaggctgtattgcccgcgtgcactcgctttttccagatgcgccagtccgtgctgattacgcagctcaatggtgtcgaccagctgactgacttcgctactaaactgcgcgaactgggcgatgttattttgtgcgagagtttgtaggtgattgctgatttcactgtcctgctgatacagcgccagcaaatcgctatattggctaacggtagttaacgttgttgcgacctgcgcacgaacacccggatcttcaatgcgtatttgccgacgttgcagaattttcaccgcattattgagctgcttttccagcgttggtgcatttttctggatctgctccagccccagattcatcaccatttgctgcacccgcagagcgctaaggcgcagttcattcatctggttaacatactcaagatcgatatcaatcagccgatcgagtgcactttcagcagcctgacgctgatcttgttcgatcaaatcgtaaatcccggcctgggtcgctccagcggaagttgtcgcattattcgcctgaccttgcgccaggcgtgcgatctcatcggcggcagcgactatctgctgactgagttgctgttgttgctggcgcagttgcaaacgctgccccaccagttccccttgctgacgtaagctacgggagatctcctgctcctgttgttcaatagcggtggtatcaaaaccttgttcccgtaacgcttgcagcaacgcattaatcttcaggctttgtgcggtgagcattcgcccctgcgcctgccacatcttttcgttatcggcactggtcaggttctgcgcggcgaaaagttcccaggcgctggcttcgctcaactggcgcgccatattcatggtaggaatcaatgcctgagtgttgtctttttccacctggctgataaagcgcaggttgtaccatcccaccagggtactggtcagggttaacagcgccatcagggcaaagcccatccagagtcttcgggtcagggttaaattcacggtcggtgcactttaggtgaaaaaggttgagtcgcaaagcggaatgcatctagcataaagccttattattgatgaggctatcatgcgcgtactgctatttttacttctttcccttttcatgttgccggcatttagcgctgataacctgttgcgctggcatgatgcgcagcatttcacggtgcaagcctctacgccgcttaaagccaaacgcgcatggaaactgtgcgcgctttatcccagcctgaaagatagttattggttaagcttgaactatggtatgcaggaggctgctcgccgctacggtgtggatttaaaagtgctggaggcaggcggctacagccagttggctacccagcaagcacaaatcgaccagtgtaaacagtggggcgcagaggccattttgctcggtagtagcacgaccagttttcccgacctgcaaaagcaggtagcaagtctgccggtgatcgaactggtaaatgctattgatgctccccaggtgaaaagccgcgttggtgtgccctggtttcagatgggctatcaaccggggcgatatctggtgcaatgggcgcacggtaaaccactgaatgtgctgttgatgcccggacccgataacgccgggggcagtaaggagatggtcgagggttttcgcgcagccattgccggaagcccggtgcgtattgttgatattgcgcttggtgataacgatattgaaatccagcgtaacctgttgcaggagatgctggaacgccatccagaaatcgacgtcgttgccggaacggccattgcggcagaggcggcaatgggggaagggcgtaacctgaaaacgccgcttaccgtggtgagcttttatcttagtcatcaggtgtatcgcgggctgaagcggggaagagtgattatggctgccagcgatcaaatggtctggcagggggaactggcggttgagcaggccatcaggcaattacaggggcaaagcgtttctgataatgtcagcccaccgattttagttctgacgccgaaaaatgccgaccgtgaacatattcgccgcagcctgagtccagggggatttcgtccggtctatttttatcagcacacaagtgcggctaagaaataatcagcacacatcagcggctaagaaataaccttcaccatgttgcgtcaccagtaaatccgcgctgagtttatgacgtaaacgacgaattaacacatcgacggtgcgcaggtcagggttttccacccgacgcgcagaaagcatacgtagcagacgttcacggctgagaatttcgcccggattcgtcacaaatgccaccaacatttcatactctgcgcgggtcagtttaatcggctcgccatcccgctccagcgtatggcggctcacattcaggcaataaccggcaaagcgatagcagttgtcctgagtgtgcggttgagcttgtcgcgcgaggtcgattcgccagagcagatttttcacccgtactaccagttcgcgcagttccagcggtttggtgacgtaatcgtctgcgcccatttccagcccaacaatacggtcaatccgatcgctgcgtccggtaaccagaataatccccaccgtactgcgttctcgcagggcgcgggttaacatcaggccattttcatcgggtaagttgatatccagcagaattaaatctacgctctgattctgcataatttcccgtagcccagcaccgctcgccgtaacggaaacggtatacccctcctgagtgaagtaggattgtaatcgcgcctgggtaaccggctcatcttcaacaataacaatgtgatgtggcatcagagggttttactcattctgttcatatctgttcatattctgccgtaagccgttcatcctgaccagtgccgctgttcatatttgctcattaagatcgcttcactaaaccataattctacaggggttattatgcggaaactctggaacgcgctacgccgacccagtgctcgttggagcgtactggcgctggtcgcaattgggattgtgattggcattgcgctgattgtattgccacacgttgggatcaaagtcaccagcacaaccgaattttgtgtcagttgccacagtatgcaaccggtgtatgaagaatataaacagagcgtgcatttccagaacgcctccggcgtgcgagctgaatgccatgactgtcatatcccgccggatattccaggcatggtgaagcgcaaactggaagcgagcaatgatatctaccagacctttattgctcactccattgatacacctgaaaaattcgaagccaaacgcgcggaacttgccgagcgtgaatgggcgcgaatgaaagaaaacaacagcgcaacctgccgctcctgccataactacgatgcgatggatcatgcgaagcagcatcctgaagcagcacgtcagatgaaggtggcagcgaaagataatcaatcctgcatcgactgtcataaaggtattgcccaccagttaccggatatgagtagcggcttccgtaagcagttcgatgagctgcgcgccagtgctaatgacagtggtgacacgctgtactctattgatattaagccaatttatgcggcgaaaggcgataaagaagcctctggttctctgctgcctgctagcgaagtgaaagtccttaaacgtgacggcgactggctgcaaattgaaattaccggctggacggaaagcgccggacgtcagcgtgtactcacccaattcccaggtaaacgcatctttgttgccagcattcgtggtgatgtgcagcagcaggtaaaaacgctggagaaaaccaccgttgccgacaccaataccgagtggagcaagttgcaggccactgcgtggatgaagaaaggcgacatggtgaacgatatcaaaccgatctgggcttatgcggatagcttgtacaacggcacctgtaaccagtgccacggcgcaccggaaatcgcccactttgacgctaacggttggatcggcacgctcaacggcatgattggctttaccagtctcgataaacgtgaagaacgcaccttgttgaaatatctgcaaatgaatgcgtctgacaccgcaggtaaggctcacggcgataagaaggaagaaaaataatgaacaataacgatctctttcaggcaagtcgtcggcgttttctggcacaactcggcggcttaaccgtcgccgggatgctggggccgagtttgttaacgccgcgacgtgcgactgcggcgcaagcggcgactgacgctgtcatcagcaaagagggcattcttaccgggagccactggggggctatccgcgcgacggtgaaggatggtcgctttgtggcggcaaaaccgttcgaactggataaatatccgagcaaaatgattgccggattgccggatcacgtacacaacgcggcgcgtattcgttatccgatggtacgcgtggactggctgcgtaagcgccatctcagcgatacctcccagcgcggtgataaccgttttgtgcgcgtgagctgggatgaagccctcgacatgttctatgaagaactggaacgcgtgcagaaaactcacgggccgagtgccttgctgaccgccagtggttggcaaagcacggggatgttccataacgctagcgggatgctggcgaaagctattgccttgcatggtaatagcgttggtacgggcggagattactctaccggtgctgcgcaggtgatcctgccgcgcgtagtcggtagcatggaagtgtatgaacagcaaacctcctggccgctggtattgcagaacagcaaaaccattgtgctgtggggctccgatttgctgaaaaaccagcaagcgaactggtggtgcccggatcacgatgtttatgaatattacgcgcagctaaaagcgaaagtcgccgccggtgaaattgaggtcatcagcatcgatccggttgtcacatccacccatgagtatctggggcgcgagcatgtgaagcacattgcggttaacccgcaaactgacgtgccgctgcaactggcgctggcacatacgctgtacagtgaaaacctgtacgacaaaaacttccttgctaactactgtgtgggttttgagcagttcctgccgtatctgctgggtgagaaagacggtcagccgaaagatgccgcatgggctgaaaaactgaccggcattgatgccgaaaccattcgtgggctggcgcggcagatggcggcgaacagaacgcaaattattgctggctggtgcgtgcagcgtatgcagcacggtgaacagtgggcgtggatgattgtggttctggcggcgatgctggggcaaattggcctgccaggtggtggttttggttttggctggcactacaacggcgcaggcacgccggggcgtaaaggcgttattctgagtggtttctccggctctacgagcattccgcctgttcacgacaacagtgactacaaaggctacagcagcactattccgattgcccgttttatcgatgcgatcctcgaaccggggaaagtgatcaactggaacggtaaaagcgtaaaactgccgccgctgaaaatgtgtatttttgccggaactaacccattccatcgccatcagcagatcaaccgcattattgaaggcttgcgcaagctggaaacggttatcgccatagataaccagtggaccagtacctgccgctttgccgatatcgtactgcctgcgaccacgcagtttgagcgtaacgatctcgaccagtacggcaatcactccaaccgtggcattatcgccatgaaacaggtggtgccgccgcagttcgaggcgcgcaacgacttcgatattttccgcgagctgtgccgtcgctttaatcgcgaagaagcctttaccgaagggctggacgaaatgggctggctgaaacgcatctggcaggaaggtgtacagcaaggcaaaggacgcggcgttcatctgccagcgtttgatgacttctggaataacaaagagtacgtcgagtttgaccatccgcagatgtttgttcgccaccaggcattccgcgaagatccggatctcgaaccgctgggcacgccgagtggcctgattgagatctacagcaaaactatcgccgatatgaactacgacgattgtcaggggcatccgatgtggtttgagaaaatcgaacgctcccacggtgggcctggcagccaaaagtatccgttgcatctgcaatctgtgcatccggatttccgacttcacagccagttatgtgagagcgaaacgctgcgtcagcaatatacggtagcgggtaaagagccagtattcattaacccgcaggatgccagcgcgcgcggtattcgtaacggtgatgtggtacgcgtctttaacgctcgcggtcaggtgttggcaggggcagtggtttctgaccgctatgcacccggcgtggcacgaattcacgaaggggcatggtacgatccagataaaggcggcgagcctggtgcgctgtgcaaatacggtaaccccaacgtgttgaccatcgacatcggtacaagccagctggcgcaggcgaccagtgcgcacactacgctggtggaaattgagaagtacaacggaacagtggagcaggtgacggcgtttaacggccccgtggagatggtggcgcagtgcgaatatgttcccgcgagccaggtgaaaagttgaattaacccgcgtcgcaggtgaaatcatgaccacgctgacagcacaacagattgcctgtgtttacgcctggctagcgcagttgttctcccgtgagctggacgatgaacaactgacgcaaatcgccagtgcgcagatggctgaatggtttagcttgctgaaaagcgaaccgccgctcactgcggcggtgaacgagctggaaaaccgtattgccacgctgacagtacgtgacgatgcccgtctggaactggccgcggacttttgcggcctgtttctgatgaccgacaaacaagcggcgctgccgtatgcaagcgcctacaaacaggacgagcaagagattaaacgcttgttagttgaggcagggatggaaaccagcggcaatttcaacgaaccggcagatcatctggcgatctatctcgaattgctcagccatctgcattttagcctgggagaggggaccgttcctgcgcgaagaatcgacagtttgcggcaaaaaacactgacggcgctgtggcaatggttaccagagtttgttgcgcgttgtcgtcagtatgacagctttggtttttacgcggcactaagccagttattgctggtgttagtggagtgcgaccaccaaaacagataacgtcgtttgtgcgcctgaaaagacgcgtttagcgtcgcatcaggcattatggcgcagttgccggatgcggcgtgaacgtcttatccggcccacaggaactgtaatctttgtagaccggttaagatgcgtcatcgcatccggcaaacacacatcacggatgagctacaaaccgggaaagccgctggcgcagcaggcggttttcctgcttcaggtgcgcaatatcatccattaacgtcagcgccaccgcgatccccggccagtccagagccagttcatgacgcaggcgtaccgcgcgttgcaccacaatggcggcatggtcgtcaaatacccaggttgtttcctggatctcacgcggttcaaccacccccaaaccgacaatttcattcaactcctcttcagagatgccggtatgcaggcaaaattcggtaatagtaaaagtcaccgtaacattagccattatgctttcccccaatctttacgtggatcaaaagagctctgggcgtctgccagttgctgccacagcgcggcagtgttttcatccggtttcggcggcatcacgattttcagtaccgcatacagatcgccggtctgttttttgctcaccagacctttgcctttaacgcgcaatcgttgcccggcctggctgcctggcgggatagtcagcaaaatgctttctttcagtgttggaacggtgactttagcacccagcgccgcttcccacgggctaaccggcaccacaatttccagatcctggccgacaatatcaaacagcggatgtggcgcaatatgaatcaccagccacaaatcgccatttggaccgccgttttcgcccggcgtcccctggcctttcagacggatgcgttgaccattgccgacgcccgccgggatcttcacattcagcgttttcggaatttcctgttcgatcatgccaaaggcgttataaaccggcaggttatagctgatggtacgcttatgctcagtaagcgtttcttcgaggaataccgccacttcgatttcaatatcgtggccgcgtgtggcggggcgttgacggctctggcgggcatgctgaccgaaaatactgctgaagatatcgtcaaaatcttcggcgttaaaactctgaccgtcgccatggtggaactgacggttaaattgcggatcgttgcgatgttgccacatctgatcatactcagcgcgacgttgttcatcacttaacacttcccaggcttcagcgacctctttgaagcgggcttcggcatccggttctttgctgacatcaggatggtatttgcgggcaagtcgacgataggcggtcttgattgtcttgagatcgtccgtcggtttcacgcccatgatggcgtaataatcctttaattccatagcgttatctcgcgtaaatcaacacaaattgaaggaacccctgtaaggtaactcctataagtgtagggtaatcctcaaaatttcatatgccaacacagaatatgttattgaaatcatcgcggagaggaggtcgccatcaagatgggttgctgaacatattttaaacaggtgaaaaagggtgagcgatttttgatagttgaaccaggcactttaagtttaactagggcgtcattatttattaaattttatagacgctatatatgggtagtaatatacatggaattagttgcactgcaaataattatttgaaacaggcctggaacgatataaaaaatgagtacgaaaaaaatcaaacatatagtatcacgctttttgaaaacacactggtgtgttttatgcggttatacaatgaactcagacgtaaagtaaatgaagaggatactccatgtctggaatgtgaaagtctagaaaaagaatttgaggaaatgcagaatgataatgatctaagtttatttatgagaatattgcgtactaatgatacacaaatttatagtggggttagtggaggtattacatatactatacaatatgttcgagatattgatattgttagagtgtccttgccgggcagagctagtgagtctatcacagattttaaaggttattattggtataactttatggagtatattgaaaacattaatgcgtgtgatgatgttttttctgagtattgttttgatgatgaaaatataagtgtccagccagagcggataaatacgccgggaatatctgatttggattctgacattgatttgtctggtatatcttttattcagcgtgaaactaaccaggcattaggattaaaatatgctcctgtagatggcgatggatattgtctgttaagagctatactggttttaaaacaacatgattatagttgggcgctggtcagttataagatgcaaaaggaagtttacaacgaattcattaaaatggttgataaaaaaacgatcgaggctcttgttgatacggcattctataatctcagggaagatgtaaagacgttatttggcgttgatctacaatctgacaaccaaattcaggggcagagtagtcttatgagttggagctttctgttttttaaaaaacaattcattgatagttgcttgaataacgaaaaatgtatcctgcatttacccgagtttatatttaatgataacaagaacttgcttgctttagataccgacacgagcgataggattaaagcggtgaagaattttcttgttgttcttagtgatagcatttgcagtttatttattgttaatagtaatgtggcaagtatctccttggggaatgaatcctttagtacagatgaagatcttgagtatggttatttaatgaacactggcaatcattatgacgtttacctccctcctgaactttttgctcaggcttacaagttaaacaataaggaaatgaatgcgcaactcgactatttaaatcgttatgcaatttaatggcaaaggcatatgctaaaaaccattgttattagtctcacacttttttattggtaaatattgtctctgtattggtaacgccgcagatattctgtttagccacaggtgcaattatcagcggcgtacgcgaggcaggggctaatcaggcatagtttgcgtcaaaccttgcctgtttttgaagatgtatatagaaaaacaggcgttcaacaagccattttgcgaacctgttcccggaaaaaagtcatatttctgtcacactctttagtgattgataacaaaagaggtgccaggaatgaacaaaacgctaatcgccgcagctgtggcagggatagttttactcgctagtaacgctcaggcacaaaccgtaccggaaggctatcagctacagcaagtgctcatgatgagccgccataacttacgtgcgccgctggcgaacaatggcagtgtgctggagcagagcacgccgaataaatggccagaatgggacgtccccggtgggcaactcaccaccaaaggtggcgtgctcgaagtgtatatgggccattacatgcgtgaatggctggcagagcaggggatggtgaaaagcggggaatgcccgccgccgtacaccgtttatgcctatgccaatagtctgcaacgtaccgttgcgaccgcacagttctttattaccggcgcattcccggggtgtgatattcctgtgcatcaccaggaaaaaatgggcactatggacccaacctttaacccggtgatcaccgatgattccgccgcattcagtgaacaggcggtggcggcaatggagaaagagctcagcaaactccagcttaccgacagctaccagctactggaaaaaatcgttaactataaagattcccctgcctgtaaagagaaacaacagtgtagcctggtggatggcaaaaatacctttagcgccaagtatcaacaagaaccaggtgtttccgggccgctgaaagtcggcaacagcctggtagatgcgtttactttgcaatattacgaaggttttccgatggatcaggtggcctggggagaaatcaaatctgaccagcagtggaaggtgttgagcaagcttaaaaacggctaccaggacagcctgtttaccagtccggaagtggcgcgcaatgttgcgaaaccgctggtcagttatatcgacaaagctctggtcaccgatcgcaccagcgcaccgaaaattacagtgttggttgggcacgactccaacattgcctctctgttaacggcgctggatttcaaaccgtatcagttgcatgaccagaacgaacgcacgccgattggcggcaaaatcgttttccagcgttggcatgacagcaaagccaatcgcgatttgatgaaaattgaatatgtgtatcagagtgcggaacagttacgtaatgccgatgcgttaaccctgcaggcacctgcgcagcgtgtgacgctggaattaagcggttgcccgatagacgctgatggtttctgcccgatggataagtttgatagcgtgttgaatgaagcggtgaaataacagaaaactcccccgcgagaagcgggggagtcgctggttaaacgtttttacgttcgatggtctgttcgccccaaaaaaggctatctttatcggtcttagcaaaggctttgactaacacttcatcactaccttcttcccaaatcttttccgccattttttcgtcgtacccggcgacttcgaaaatggcctcggctatttccgggctcgtattgcgcagagatgcccattcaccgacgtgatgagctttcgcttcttgagttggcatgcgtatcctcctgttgaagattagccgttaagtttaactgccagacctgcgacatattccccttgataacgagcaatagacagttcttcctggctgggctggcgactaccgtcaccgcctgcgatggtggttgcgccgtacggcgtaccgccgcgaacctgactaacgtcaaataattcctgcgctgcgtagccaatagggacaattaccatgccgtgatgcgcaagggtcgtccaggtggatgtgatggtttgttcctgaccgccgccagtaccggtggaactaaagacgctcgccagttttccgtatagtgcgccggaagcccacaggccgcccgtctggtcgaggaaggtacgcatttgaccggacatgttgccaaagcgggtaggtgtaccaaaaataatggcgtcgtaatcggccagttcttgcggggttgcaaccggtgcagtttgcgttttaccgcctgctttttcaaataattgcggcggcatggtttccggtacacgcttaacgacaacttcagcgccatccactttgcttgcaccctcagcgactgcgcgtgccatcgtttcaatatgtccgtacatggaataataaagcaccagaactttagccatttctaaccactcctcgtgttatctctattccgtagcgattcgctaccacttatttaaagataagacgtccttttcagagtgcaaatttcacaaccacttatttgatttataacaactttcacaagcacgtaattttgtcgcaaaatgacacatttttatctcatcgcgtttttttaatcataagagcggcttatggataattattggagatgatatctattctcgctaagaagctgttgcaggatattaccaaacgcgggtctgcccgcgtcagttcactaagcttagtcccacgtagcgaaaatatggcagccgccatacgccgcgttaattctatgcaatatgatgtctatacccagacggaggtcagtaatggcaaaccatcgaggcggttccggcaattttgcagaagaccgcgaaagagcaagtgaagcaggtaaaaaaggtggacagcacagcgggggtaatttcaagaatgacccgcagcgcgcatctgaagcaggtaaaaaaggtggtaagagcagtcacggcaaaagcgacaactaaccgggctaatcaatgacgaatgcatttttgtctgtagctcgtcaaaaagccatcaccgccggttacccggtggttgatactgatgacaaatgtaagcttgcctgatgcgcgatgcttatcaggcctaccagaagattgcaatatattgaatttgcactgttttgtaggccggataaggcgtttacgccgcatccggcatgaacaatgcgtacgttgtcaacaatctgcaccgccggtaaccccggcggttttctgtttatggctcctgatgaacaacttctggcggtggaacgtcaaccaactttctgcttaacaacgcattgagtaaaatcgcgccaaaggttgctgtaccaatccctcccaacgtaaaaccgcccagcgtgagagcaaaatcacccgcgcccagcactaaggttactgcgaccataatcaaattaccgttctggcttaaatcgacacggttttgtacccatatccttgcgcctgcgacggcaatcagcccgaacacaacaatacttgcaccaccaataaccgcggccggaatggtatgaatcagcgcaccaaatttcggactaaagcccaacagcatggcgatgacggcagcagcaacaaacaccagcgtgctgtagactttggtcacggccatcacaccgatattttcagcataggtggtcacgccgctaccgccgacagagccggaaagcatcgttgccagaccatcgcctacgaatgcccgccccatatacgggtccatattgcgtccggtcatcccggcgactgccttgagatgacctaagttttccgccaccagaatcaccgccacgggcgcaatcagcatcattgcctgaccattaaaagcaggagtggaaaaatgtggcagaccgaaccaggcagcatggctgacgagagtaaaatcgacggcttttcccagccctaaaacgttggtcatcacgccatacagcagacaggcgacaattaatcctacgagaatcaataaccgctggatcatgccacgggtaaacaccgccaccagcccaatacacagcaccgtcattaccgccatccagctatcaaaggcgctagcgcttacacttttcactgcgataggcgctaagttcaggccaatcgccatcaccaccgcacccgtcaccaccggcggcatcagtcgttcaatccagcgcgtaccgattttcatcaccaccaggccaatgacggtataaaccagcccacaggcgataatcccgcccagcgcaatgctgatattcgggttaatgccctgaccgttaaagcccgtcgcggcgatcaccacgccgacaaaagccgcgctggagccgagataactggggacgcgcccgccggtaataaagaaaaacagtaacgtgccgatcccgctcattaaaatggaaagattgggatccagccccatcagaatcggcattaacaccgtcgcgccaaacatcgccaccgcgtgttgaacgcccattactgccgtctgagcaaacggcaatcgttcatccggcgcgaccacgccgctctctgtagaggtgctttttaactgccagtgaggaaaaccgaacattgccatcagctgtctccttaaggaggttaacaagcagggcgcatcagcgcgtgataactgcgatcgaaccacaccagcccgtagggtgtggtgtgacgatgaatcgcttcgatggcgcaaaacagaatgtcgtgggtgccgacgctcaccacctggctgatacggcagtcaaagctaaccagagcctcttccagttgcgggcatccggtcacccccgtctgccagcgggcggcggcaaagcggtgttccatgggcgttttgccgccaaaaaggttactaagcggctcctgcccggcgctaagtgtatttacacacagcgttcgattttcattgaatgccggccagacggacgccccacgattcaggcacaccagtaatgtgggcggcgtatcggtcacactgcagacggcgctggcggtgaacccggcgcgcccggctggaccgtccgtggtgataatattgaccgccgcgcccatgcaggacatcgcatcgcgaaaagtttgttgatcgacaatgttcatagtttgctccttacaacagcccgcaggcttcttcaaaggacagacgtggcaggcgcgcataaagcttgctgctatcgccatagccgatattaatcagcagattgctcttcagcgtgctgcccgtaaaaaaggcgtcgtccacgtgttgacggtcaaagccgctcatcgggccggtatccagtcccagcgcccggcaggcgacgatcagataggccgcctgcatggaactgttgcgaaacgctgtttcttcggcaagttgtgggctggaggtaaaccaactgcgggcatcaccgtggggaaacagtagtggtaaccgttcataaaattcactgtcccaggcgacgatagcggtgacgggcgcggtcagggttttttgcagattgccgctggaaagtgccgggcgcagacgttcttttccttctgccgtgcgggtaaacacgatccgtgccggagaacagttagcacttgtcggcccccatttcatcagggcataaatctcccgtaacgtctcatcgctgacgggtgtctcccgccagccgttgtgagtgcgggcatcggtgaacagggtgctaagcgcacctgggctaacggcttcgttcatagcaattccttacagggcggcttcacggtgatgtaacaggctggcaagcccgttgagtaacagagcattaaacgtttcgggatcggtcacgttgcaggcgtgtccgccatagggcatcaccattttctggctatcgggcagggcggcatgaagttcactggaacatgctgttggcaccagcagatcatcactggcgcagatgatttgcaccgggcagcggatgcgatccgcatggtgactaaagtcagcgcgtttgagggcgttaagtcgacgcagtaaattatttttgccctgaaaatgcgccagtgccagcgcgtcttctgcctccaggcgaggtgcgcgggccgccatccagtcggcgggatagaggaacaacggctgcgcttccacccatgcctgcgcgccgccgctatacagtaatcgttcgcgaacctgaaaacagcggcgcgtatgggcgtttattcgtagccagccgttaacgctgatcagcacagttacgctcgcgggataatccagcgccagctgcattcccaccagcgcaccgagcgcatggccgaccactgcgtaatgctcaatccctgcggctaccagcgcctgatgcagttccgctgccatctgggcgatactgtaatcttctgccagcgtgtcgggattattgccggtgccgcgctggtcgtaacagactacctgatactcctgctccagcaccgccagttgcggtaaccagtaactgccgctacccccaagaccgctaatcaacaccactacgggcgcatcagcataagggggaggactgagactaagtttcatcgcggcctcacttggcgatatgcgcaattgtggcgatttccaccagcgcgtcaggttttaccagtccgcactgaatgcagaatcgcgccggtttatcacccggaaaaaactcggcgtagatttcgttaatcgcggcgtaatttttccagtcggtaataaagatgctgttgaaggtcacatccgccatcgtgccacccgccgtctcgatcaccttgcggatagtttccagaacgtggcgggtttgcgcctttgggtcatcggcaaacagcacgttattatgttgatcaaaagccagcgtaccggagacatacaccacgccatcagccagcgtgccgggaacgaagggggccagcggtgcgctgctgccagcgggaataattacggattttggcatcgttaaactccttaagcgatatgagcaaaggacgtgggagaaagcgcgtcgcagaatgtttcgacgtcgctgacccagccaaaaaaggtttcgatattgaacaacgcggctttctgcgcaaatttcggccccgcctggtgagttgcgtcttcaagcaccacgccgaaatactccagaaaaaagccgtcgcgtagcgtgctttcgacgcagacgttggtagcgatgccggtgaaaaccagatggcgtattccgcggctgcgcaaaatgctgtccagcggcgtattgaagaaaccgctgtagcgcggcttcggcagcacaatatcgccaggctgcggcaccagttcatccaccagttgataatcccaggagcctttcgccagcaatttcccctgcagctgcggctgcttacgcatggttttcagggcgttgcttttatgaaaattcggactgccgggtccgccagcctcgacatactgttcatcccagccattttgaaaccagatgatcagcatccctgccgctcgcgctgcggtcacggcggtttgaatgttggcaatgaccgggcgagtggtactgacatcaaacccggcgagatctaagtagccgcctggcgtggcataagcgttttgcatatccaccacgatcagcgcactttgctgcggatcgaaggtaatggcttccggtcgagcggttaaggtcgtcatcatgccacctcctgagtcagcgcaggtagatgggcgcggcattgcatcagtggttgaatgcgctcgccgaaggtttcgattccgctcagaaaatcgtcgaaggttaacagcacgccttcggcaccaggcacgcttgcgacttcatctaacatgcgcgcgacactggcgtaagaaccgactaacgtccccatattgatgtttaccgcgctagtgggatcggccatctgacgaacgttggtgtcagtaccggagcgggtatctttctgactttgttcggttagccagcttaacgcctcttcatccgcgcccgctttgtagtgttcccatttggcgcgagcggcatcgtcggtttcatcggcaatcaccataaacaacacataagagccaacgtcgcgtccggtttgctctgcggcctgtttcatccgcgcagcggtcggggcgaaagccgtgggtgtatttacgcctttgccgaaacagaagttgaaatcggcataccgggcggagaacgccatgccagcgtcgctttgcccggcgcagatcactttcatggggacactcggttgcggactcacgcgacaatcattcatggtgaaaaaatcgcctttaaaatcgcttttccccgtgccccacaggtcgcgcagcacctgaacatattcggtgagatagtcgtaacgacgggagaaatagtcatcgccaggccagatacccatctgctcatactcgggcttttgccagccagtcacgaggttgacgccaaaacgcccgccagagatggagtcgatggttgcggccatacgggcgacgattgccggaggtaacgttaaggtggcagcagtggcgtaaatctgaatgcggctggtcacggccgccagccccgccatcaaggtgaagctctcaaggttgtgatcccagaactcagttttgccgccaaagccacgcagtttgatcatgctcagggcgaaatcgaaatggtagtgctccgctttttgcacaatggctttattcagttcaaaggtcggcatgtactgcggcgcgtgggtgctaatgagccagccgttgttgccaataggtacgaatacgccaattttcatcatcaacctctcttcgtctcgtaaagtgaaagtcagacggggcgctgcatcctgcatatccttttcagccgcgtattggcttgtttgcaaagcggatgccagtttttaaaaagttaatgttattaatctgttaacattacgttatctaaaatatctggtaaaaagtggactaaacggtcaaaacagttgcacataaaacatgcatctgtgcgcgatgagagtgcagaaggtcgaggccgggcgggggttttgctatcctgttgccaatctacaagaggggagagcgcatgacgcaaggcgcagtgaaaacaacgggtaaacgtagccgcgcagtaagcgcgaagaaaaaagcgattcttagcgcagcactggacacttttagtcaattcggttttcacggcacaaggctggagcagatcgcagagttggcgggtgttagtaaaaccaatctgctgtattactttccgagtaaagaggcgctgtatattgccgtgctgcggcagattctcgatatctggctggcaccgttaaaagcgtttcgtgaagatttcgccccgctggcggcgatcaaagagtacatccgtctgaagctggaagtcagtcgcgattatccgcaggctagccgcctgttctgtatggagatgctggcaggcgcgccgctgttaatggatgaactgacgggcgatttgaaggcattaattgatgagaaaagcgcgctgattgccggttgggtcaaaagcggcaaactcgcgccgattgatccgcagcatttgatttttatgatttgggcttccactcaacattacgccgatttcgcccctcaggtggaggcggtgacaggcgcgacgttgcgcgatgaggtatttttcaatcaaacggttgaaaacgtgcagcggattattattgaggggattcgaccacgttaaagatgccggaggaggttgtaacatcctccggctacctgtttaacctatagtcattaagctggcgttaccgccagcggcagcggtattcacactcaggctacgctcgatatacagccgttccagaaggatattgctttcgccacgggcaaaaccctgcacgctaacaattgtgccatcccgcgcggcaactgcttcacacaatgcgcgaagctgatcgctatcaccgtggaagatcaccgcatcaaacggttgagcggttatattttccgctttcgccagttgaatacgttcgctgactgcgcttggcaatgccttcactaactgacgatgcagcgcgtcatccggccacagtacctggctgcccaccgccagcacggcggcgagctgagtcagcgcatcctgctcatcatcggcaatacacaacacgcgctcacgcggcagcagcgtccaggtgttgcgttcacccgtcggccccggcagcaatcgttgtgttcctgcctgcgccagctcgccatattgcgtacataacgcctgcaattctggacgatttgctgcccattcccgcagtgcatttagcggctgagtcaatgcggctttcaactgcgcatcgaccggatactttgcatcctgacgcgcgagcgtcactgccagcgcactttccgggcgattcgccagcagacggtagagatagagcggaccgcctgctttcggcccggtaccggacaacccttcgccgccgaacggctgcacaccaaccactgcgcccaccatattacggttaacatacaggttaccaacatgggcgctgccagtgacctgggcgatggtttcatcaatgcgcgtatggacgccaagcgtcagaccataaccggaagcgttaatctgctcgatcagctctggtagctggttacggttgtaacgcaccacatgcagcaccggaccaaagacctctttttgcaattcggcaaagtcatccagttcgatcagcgtcggggcgacaaaggtgccgctttgccattcacgggcatcttcgctgttttcccgcaccgcctggaacaccggacggcctttgctacgcatggtctgaatatggcgctcaatattggctttcgcttcgctatcaatcactggaccgatatcggtggtcaggcgacccggattacccatccggcattcggccattgcgccgcgcagcattttcaacgtgtggtcggcaatctcatcttgcaggcacagcacgcgcagcgcgctacaacgctgacccgcactgtcgaacgcgctggccagtacatccacgacgacctgttcggtcagtgcactagaatcgacaatcatcgcgttcatgccgccggtttcagcgatgagcggaatagggcgaccctgagcgtccaggcggctggcgatattgcgctgcagtaacgtagcgacttcggtactaccggtaaacatcaccccgcgcacgcgatcatcacccgtcagttgcgcgcccacggtttcaccccgacctggcagcaattgcaccacgcctggcggtacacccgcttccagcaaaatggcgatcccttgcgcggcaatcagcggcgtttgttctgccggttttgccagcacgctgttacctgccgccagtgcggcggcgatctgcccggtgaaaatagccagcgggaagttccacggactgatacacaccacaggccctaatggacggtgggtttcgttagcgaaatcatcccgcacctgtccggcgtagtagtggagaaaatcgaccgcttcgcgcacttcggcaatggcgttactgaaggtttttccggcctcacgcaccagaataccaatcagttgctgcatctggctttccatcagcacggcagcgcggtgcaaaatcgctgcgcgttcagccggaggcgtggcaaaccagattggcgcgttattaaccgcactttccagcgcctgttctacttcacgcggcgtggcttcacgcacatagcccacaatatctttcggttccgcagggttaataacggggctcatctcacctgccgctaccggttgttccagcattggcaaggcctgccatttttgcagtgcactattgagcagggcagaggagaggctggccaggcggtgttcgttagcgagatccagccctgcgctgttgtcgcgcccgtgaccgtaaagatcgcgcggcaggggaattttcggatgcggtaatccagtttgcccttcctgttgcgccagtttttctacagcagtgaccggatcggcgaccagttcatccagtggcaaagaggtgtcggcaatacggttaacaaagctggtgttagcaccgttttccagcaggcgacgcaccagatacgccaacagcgtttcatgtgtgccaaccggagcataaatacgacacggacggttaagtttgccgtcggcaactttcccggggacctgctcatacagtggctcgcccataccatgcaggcactggaactcgtactgacccgggtagtagttctgccccgccagttgataaatcgccgccagcgtatgggcgttgtgcgtcgcgaactgcgggtagattagattcggcaccgccagcagctttttcgcacaggcgagataagaaacgtcggtatacaccttgcgggtataaaccggataaccttcaaggccgtccatctgcgcacgcttaatttcactatcccagtacgcgcctttcaccaggcgaatcatcagacggcgacggctgcgggtggcgagatcaatcaggtaatcgatcaccaacgggcagcgtttttgataagcctgaataacaaaaccgatgccgttccagcctgccagttccggctcgaaacagagtttttccagcagatcgagggagatctccaggcgatcggactcttcggcgtcaatgttgataccaatatcgtactgacgcgccagcagggtgagacttttcagacgcgggtaaagctcttccattacccggtcatactgggcgcggctataacgcggatgcagcgcgctcagtttgatactaatgcccggcccttcatagatgccacgaccgttagacgctttaccgatggcgtgaatcgcctgctgataggaaaccatatacgcctgtgcatctgcggcggtcagcgcggcttcgcccagcatatcgtaagagtaacggaaacctttctcttccagcttgcgggcattggctaacgcttccgcgatggtttcgccagtgacgaactgctcacccatcaggcgcatcgccatatccacacctttgcggatcagcggttcaccgcttttaccgataatgcggttcaggctgcgggagaggctggcttcgttatgggtggaaaccagtttgccagtaaacagcagcccccaggtggcggcattaacaaacagactcgggctacgaccaatgtgactctgccagttaccgttgctgattttgtcgcgaattaacgcgtcgcgggtggctttgtcgggaatacgcaacaacgcttccgccagacacatcagcgccacgccttcctggctactcaggctaaactcctgcaataacccctggaccatacctgcgcgaccactggcatttttttgattacgcagtttatcggccagctgatacgccagtttgtgcgcctgttcagcaactggctgcggcaggcgggcttgttccagcagcatagaaaccgcttcggtttccgggcggcgataggccgcggtgatcgcggcgcgggaaacgctctggggcaatatttgctcggcaaagtcgaggaatggctggtgtggttcctctgccggagtcggtgcttcatcgctctcattggccgcgccagaaagcagcgcaggtagctccggcagagtatcgctgttttccagttgttcgagataagaaaaaatcgcctgcttaattaaccagtgtggtgtgcgatcgatacgtgtcgcggcagacttaatacgctcacgcgtcgcgtcgtccagcttaacccccatggtggtggttcccatgccattactcctgttgttcagaaaggtgcaacttaacgttatcgtgaaatatccatgatgttgcaactttgtgcaaccatgttaaatgtgacatgcgtagcaagcttaaaaatgaatgaaatgttaataaaagaaatcgatatgacagggattaaaaaaataactcagactttttctctgcggcagttaacatttttgaaaggtgcaaccgcaaaaaatgtgagagagtgcaacctgatgaaaaatagtgtcgctgagcactaaaatttaatgtaaatggtgtgttaaatcgattgtgaataaccagcgcttccggcaggatacggtcgccctggtaaaacataaactctgttaccccgttccggtggcagatataacggcaagtttcgacattgccgataataattttttggagactttagatggctattagcacaccgatgttggtgacattttgtgtctatatctttggcatgatattgattgggtttatcgcctggcgaagtacgaaaaactttgacgactatattctgggcggtcgtagtcttgggccattcgtgacggcattaagcgcgggtgcgagcgatatgagcggctggctgttaatggggttgccgggcgctgtttttctttccgggatttccgaaagctggatcgccattggcctgacattaggcgcgtggattaactggaagctggtggccgggcggttgcgtgtgcataccgaatacaacaataacgccttaacactgccggattatttcaccgggcgctttgaagataaaagccgcattttgcgcattatctctgcgctggttattttgctgttcttcaccatttattgcgctagcggcattgtggcaggcgcgcgtctgtttgaaagtacctttggcatgagctacgaaacggctctgtgggcgggcgctgcggcgacgatcctttacacctttattggcggtttcctcgcggtgagctggactgacactgtacaggccagcctgatgatttttgccctgatcctgacgccggttatcgtcattatcagtgtcggtggctttggtgacagcctggaagtgatcaaacaaaagagcatcgaaaacgttgatatgctcaaaggtctgaactttgttgccattatcagtctgatgggttgggggctgggttacttcgggcagccgcacattctggcgcgttttatggcggcggattctcaccacagcattgtccatgcgcgtcgtattagtatgacctggatgatcctctgcctggcaggggcggtggctgtcggcttctttgggattgcttactttaacgatcatccggcgttggctggtgcggtaaatcagaacgccgagcgtgtgtttatcgaactggcgcaaattctgtttaacccgtggattgccgggattctgctgagcgcaattctggcggcggtaatgagtaccttaagttgccagctgctggtgtgctccagtgcgattaccgaagatttgtacaaagcgtttctgcgtaaacatgccagccagaaagagctggtgtgggtagggcgtgtgatggtgctggtggtggcgctggtggcgattgcgctggcggcaaacccggaaaaccgcgtgctgggcttagtgagctacgcgtgggcaggctttggcgcggcgtttggtccagtggtgctgttcagcgtgatgtggagtcgcatgacgcgtaacggtgcgctggcggggatgatcatcggtgcgctgacggttatcgtctggaaacagttcggctggctgggactgtacgaaattattccgggctttatcttcggcagtattgggattgtagtgtttagtttgctgggtaaagcgccgagtgcggcgatgcaaaaacgctttgccgaggccgatgcgcactatcatagcgctccgccgagtcggttgcaggaaagctaagggacttagcctgcggcggttttgtttggcttcagcagcgggttgcgctcccttaatgtgcctcgccatataaattgaatggtgcagggagcgcgcagggggcggccaatcgccgccgccccctgctgtcccggccttcggggaacgcttcagcgattttgacgccaccaacacccgagctgttattatgttccgggcaaaaagttagatttgataatcgcggatggacgaaattgcttgatacacccgcttatcagttttacatggaagctctgatgcattgagtctggacagttttgtcggctggatacggcgtttacgcggcatccggcaagaacacatggttctttgcaaacaatcccatctttctaccctggaataatcgtttatatcccttggcattacctctctttgtttacattccaacatcattttataaacattccgcttgtgtttttctttgccgtaatgataatcgctatcactgcgatttacttttctttgcatagattgactcagaaaaacgtttaagggtgggtggcatgtttgttccgtttctcattatgttgcgcgaaggacttgaagccgcgctgattgtcagtttgattgccagctatcttaagcgtacccagcgaggccgatggattgtgtgatgtggattggcgtgttgcttgccgctgcgttgtgcctgggcttgggtatcttcattaacgaaaccaccggcgaatttccgcaaaaagaacaggaactgtttgaaggtatcgtggcggtgatcgccgtggtgatccttacctggatggttttctggatgcgcaaagtgtcgcgcaacgtcaaagtgcaactggaacaggcagtcgatagcgcattgcagcgtggaaatcatcatggctgggcgctggtgatgatggtcttttttgccgttgcaagggaagggctggagtcggtctttttcctgctggcggcatttcaacaagatgtcgggatctggccgccgctgggtgcaatgctcggtcttgctactgccgtggtgctaggcttcctgctctactggggcggtattcgcctcaatcttggtgcattttttaaatggaccagcctgtttattctcttcgtcgccgcagggctggcagctggtgccattcgcgcatttcatgaagccggattgtggaaccactttcaggaaatcgccttcgatatgagtgcggtgctctcaactcactcgctgtttggcacgctgatggaagggatttttggctatcaggaagcgccgagcgtcagcgaagtcgccgtctggtttatttatctcatcccggcgctggtggcatttgctctgccaccacgcgcaggggcgacagcgtctcgctccgcgtaacaaatacgacgcaaactcttgcttagttacaacatactttaaagggatagtctcgtcatgaccattaacttccgccgtaacgcattgcagttgagcgtggctgcgctgttttcttctgcttttatggctaacgccgctgatgtgccgcaggtcaaagtgaccgtgacggataagcagtgcgaaccgatgaccattacggttaacgccgggaaaacacagttcattattcagaaccacagccagaaggcgctggagtgggagatcctcaaaggcgtgatggtggtggaagagcgggaaaatatcgcccctggctttagccagaaaatgacggcgaatttacagcctggcgaatacgatatgacctgcggtctgctgactaacccgaaagggaagttgatcgtcaaaggtgaggcaacggcggatgcggcgcaaagtgatgcgctgttaagtcttggtggtgcaattactgcatataaagcgtatgtcatggcggaaaccacgcagctggtgaccgacaccaaagcctttaccgacgcgattaaagcaggcgatatcgaaaaagcgaaagcactgtatgcaccgacgcgccagcactatgagcgtattgaaccgattgctgaactgttctccgatctggatggcagcattgacgcccgtgaagatgattacgagcaaaaagccgccgacccaaaattcactggtttccaccgtctggaaaaagcattgtttggcgacaacaccaccaaagggatggatcagtacgctgagcagctttataccgatgtggtcgatttgcaaaaacgcatcagtgaactggctttcccacctagtaaagtggtcggcggcgcagccggactgattgaggaagtggcagccagcaaaattagcggtgaagaagatcgctacagccacaccgatctgtgggatttccaggctaacgttgaaggcagccagaaaattgtcgatttgctgcgtccacaactgcaaaaagccaacccggaactgctggcaaaagtcgatgccaactttaaaaaggtcgataccattctggcgaaataccgtactaaagacggttttgaaacctacgacaaattgaccgatgccgaccggaatgcactgaaaggaccgattactgcgctggcggaagatctggcgcaacttcgcggtgtgctgggactggattaagcgttatgcagtataaagatgaaaacggcgtgaatgaaccgagtcgccgacgtttactgaaagtgataggtgcactggcgctggcgggaagttgtccggtcgctcatgcacaaaaaacgcaaagtgcgccgggtacgcttagtccggatgctcgcaatgagaaacagccgttttatggtgagcatcaggcagggatcctgacgccacaacaggccgcaatgatgctggtggcgtttgatgtgcttgccagcgataaagccgatcttgagcggttgtttcgcttgttgactcagcgttttgcttttctgactcagggcggagcagcaccagaaacgccaaatccgcgcctgccaccactcgattccggcattcttggcggctacattgcgcccgataatctcaccatcacgttaagcgtgggtcacagtttgtttgatgagcgctttggccttgcgccacagatgccaaaaaagctgcagaagatgacgcgtttccccaacgacagcctggatgcggcgttatgtcatggtgatgtgttgctacagatttgcgccaacacccaggacacggttatccatgcgctgcgcgatatcatcaaacacacgccggatttgctcagtgtgcgctggaagcgggaagggtttatttccgatcacgcggcgcgtagtaaaggcaaagagacgccgattaatttgctgggtttcaaagacggcactgccaatcccgatagccagaatgataagttgatgcaaaaagtggtgtgggtaacggcagatcagcaggagcctgcgtggacaatcggtggcagctatcaggcagtacgcttgattcagtttcgagtggaattttgggacagaacgccgctgaaagaacagcagacgatttttggccgtgataagcaaaccggtgcgccgctgggaatgcagcatgagcatgatgtgcctgattacgccagcgacccggaagggaaggtgatcgcgctggacagccatatccggctggcgaatccccgcacggcggagagtgagtccagcctgatgctgcgtcgtggctacagttatagtctgggcgtcaccaactccgggcaactggatatggggttgctgtttgtctgctaccaacacgatctggaaaaaggcttcctgacagtacaaaaaaggctcaatggcgaagcgctggaggaatacgttaaacctatcggcggcggttatttttttgcgctgccgggggtgaaggacgcgaacgattatttcggaagcgcgttattgcgggtttaatgtttttaggcggataaggcatttgtgcgcagatgcctgatgcgacgcttgcgcgtcttatcatgcctacaatcagtgcgggtttggtaggctggataaggcgttcacgccgcatccggcgatcgtgcactgatgcctgatgcaaatcctgctgaaagcacacagcttttttcatcactgtcatcactctgtcatctttccagtagaaactaatgtcactgaaatggtgttttatagttaaatataagtaaatatattgttgcaataaatgcgagatctgttgtacttattaagtagcagcggaagttcccggcagtgatagtcagtcactatggagatcgcggatggtaacgtcctgtactggacatgttttagataatcaacgcgccaccactcgcggagttttctcctccggtagtcatctcgtcactttgcattttcaacctcatcctttctttagttgtgttaccgacgccgtaaacggtgcgcgtagccgttttagcgcattttatccaaaagcaaactatggcttacaaggaagccaaccctctgatgttcgtgcgcataatcgcgctgccaacggcgcgtgtgatgaatacaaacaactcaaggtgctctccatgggaagacaaaaagcagtgatcaaagctcgtcgcgaggcaaaacgtgtgctgagacgggatagccgcagccataagcagcgtgaagaagaaagcgtcaccagccttgtgcagatgggcggcgtagaagccattggtatggcccgcgacagtcgcgatactagccccatcctcgcgcgaaatgaagcgcaattgcactatctgaaggctattgagagtaagcagctgatattcgccacgggcgaagccgggtgcggaaaaacctggatcagcgcagcaaaagcggcagaggccctgatacataaggatgtcgacaggattatcgtcacccgtccagttctgcaagccgatgaagatcttggcttcttacctggagatatcgcagaaaagtttgctccctattttcgcccggtctacgacgtgctggtccggcgcttaggggcttcctttatgcagtactgcctgcgaccggaaatagggaaggtggaaattgcgccgttcgcctatatgcgtggacgtacctttgaaaatgcagtcgtcattcttgacgaggcgcagaatgtgactgccgcgcaaatgaaaatgtttttaacccgcctcggggagaacgtgacggttatcgtcaacggtgatatcacgcaatgcgatttgcctcgcggcgtgtgctccggattaagtgacgcgctggaacgtttcgaagaagatgaaatggttgggatcgtccggttcggtaaagaggactgcgtacgtagcgcactttgccaacgtacgctgcatgcctacagttaagtgtgttatcggtgcagagcccgggcgaaccgggctttgttttgggtgttcccggtgtgtgcaatatacgaaaaaaaagcccgtactttcgtacgagctcttctttaaatatggcggtgagggggggattgactcgcttcgctcgccctgcgggcagcccgctcactgcgttcacggtctgtccaactggctgtcgccagttgtcgaaccccggtcggggcttctcatccccccggtgtgtgcaatatacgaaaaaaaagcccgtactttcgtacgagctcttctttaaatatggcggtgagggggggattcgaacccccgatacgttgccgtatacacactttccaggcgtgctccttcagccactcggacacctcaccaaattgtcgttcctgtcttgctggaacgggcgctaatttagggaaatcatgacctgaggtcaacaaactttttgaaaaaatcgcgcgtttattcaaacttcaatcaatgtgtggttttaataagcgaaatctgctttttttgccaccgaccacggatttgttatgctggtggcctttgtagatcataacgataagtgcgaataaatttcgcacaacgcttttcgggagtcagtatggatatcatcttttatcacccaacgttcgatacccaatggtggattgaggcactgcgcaaagctattcctcaggcaagagtcagagcatggaaaagcggagataatgactctgctgattatgctttagtctggcatcctcctgttgaaatgctggcagggcgcgatcttaaagcggtgttcgcactcggggccggtgttgattctattttgagcaagctacaggcacaccctgaaatgctgaacccttctgttccactttttcgcctggaagataccggtatgggcgagcaaatgcaggaatatgctgtcagtcaggtgctgcattggtttcgacgttttgacgattatcgcatccagcaaaatagtagccattggcaaccgctgcctgaatatcatcgggaagattttaccatcggcattttgggcgcaggcgtactgggcagtaaagttgctcagagtctgcaaacctggcgctttccgctgcgttgctggagtcgaacccgtaaaagctggcctggcgtgcaaagctttgccggacgggaagaactgtctgcatttctgagccaatgtcgggtattgattaatttgttaccgaatacccctgaaaccgtcggcattattaatcaacaattactcgaaaaattaccggatggcgcgtatctcctcaacctggcgcgtggtgttcatgttgtggaagatgacctgctcgcggcgctggatagcggcaaagttaaaggcgcaatgttggatgtttttaatcgtgaacccttaccgcctgaaagtccgctctggcaacatccacgcgtgacgataacaccacatgtcgccgcgattacccgtcccgctgaagctgtggagtacatttctcgcaccattgcccagctcgaaaaaggggagagggtctgcgggcaagtcgaccgcgcacgcggctactaataaagcatcaggattcctgctatccttggcgggaattgaatacaggagagagttatgtatcccgtcgaccttcatatgcataccgttgccagcacacatgcatatagcacattaagtgattacattgcccaggccaaacaaaagggcattaaactttttgcgatcaccgatcatggcccggatatggaagatgcgccgcatcactggcacttcattaacatgcgtatctggccgcgagtggttgatggggtagggatcctgcgcggcatcgaagctaacattaaaaatgttgatggtgaaattgactgcagcggtaaaatgtttgacagcctggatctaattattgccggttttcatgagccggtttttgcgccacatgataaagcgaccaatacacaagcgatgatcgccactatcgccagcggcaatgtgcatataataagccatcccggaaatcccaaatatgaaatagatgtgaaagccgttgctgaagcagccgcgaaacatcaggtggcgctggaaatcaataattccagttttttacacagtcgtaagggcagtgaagacaactgtcgtgaggtagccgcagcggtacgtgatgctggaggttgggtggcattaggcagcgattctcacaccgcgtttaccatgggggaatttgaagagtgtcttaaaatcctcgacgcggtagattttccgccagagcgcattttgaatgtttctccgcgccgcttactgaacttccttgaatctcgcggtatggcaccgattgcggaatttgcagacctttaattactagtaatggaaatatattaatgaacgagttttctatcctctgtcgtgtgctgggtagcctctattaccgccaaccacaagatcctttactggtgccgctgtttaccctgattcgtgaggggaaactggctgcgaactggccactggagcaggatgagttgctgacacgtttgcagaaaagctgtgatatgacgcaagtctctgccgattacaatgcgttgtttatcggcgatgaatgtgctgtgccgccatatcgtagcgcatgggttgagggcgcgacggaagcggaagtgcgcgcttttctttctgagcgagggatgccattagcggatacgccagccgatcacatcggcacattgctgctcgcagcttcctggctggaagatcagagtacggaagatgagagcgaagcactggaaacactgttcagtgagtatctgttaccctggtgtggtgcgttccttggcaaagtggaggcccatgcaaccacgcctttctggcgcaccatggcaccgctaacccgcgatgccattagtgcaatgtgggacgagctggaagaagattctgaagaataagtgtgatctacgtcactcataactgcaacggataatttgttgttgcataaaatgtgtgctcgatctcattcatggccgcgttttctgctatcatgcgcggcatgaacatacttctctctattgcaatcacaacaggcattctctccggtatctggggatgggtggctgtttccctgggcttactaagctgggcgggcttcctgggctgtacggcctactttgcctgcccgcaaggtgggctgaaagggctggcgatctccgctgcaaccctgcttagtggcgtggtgtgggcgatggtcattatttacggtagtgcactggcaccacatctggaaattctcggttatgtcataaccggtattgtcgcgtttctgatgtgtattcaggccaaacagctgctgcttagttttgttccggggacgtttataggcgcatgcgcgacgtttgccgggcagggtgactggaaactggtgttacctagcctggcgcttgggctgatatttggttacgcaatgaaaaacagtggcctgtggctggcggcgcgtagtgcaaagacggcgcaccgtgagcaggaaatcaaaaataaagcgtgaggggcactcacgctttcgcttaaacagtaaaatgccggatgataattccggcttttttatctgtcaggattccggtggaacgctcatatggcggtatttcaccagaatgtcattctgccgttctgctttattttgcaaatcccacagaccacggtcgataccatcattaatcaggaaaatgacccctgtttcgatagcgctcatcaggcacagcataacaggttcgttgctggtgtaacccacttccccttcaagcaagcgctggtagtcaataaagcggaaaaccccggcctgaacttcataggaaagtatcgtcttactggtgttcacgctagaaaggatctcgccggtactcacattgacgacgcgcaggttcacggcaatctgatcgagctggtattgcgtgtcggcaccgatgccaaaatatcttgccccaaccccgccagatttgacgttgctttcataaccgataatgctaccttcaaccatgatatttgccgccgttaaagattgcagcgggattcggttattaatggcaaccgtgccgttttcttgtgccgcacgaataatcttgcgctcgttaagcaggttttgtaagccctggcgctccagcggtataaaccagcgagaatctttcagtgccgtgaccagcattgccgtggcgctttgcggaacagcagtggagaagttacttgccgggtagggtttaaattgcccggtttcgtcctgaatgttgtatacgctaacaaagattttacccgtcggcgctggcagatgggtcaaatctttgtagctctgagcacgaggcattaatgtcggtctggcggcttctttaggcggggcggttaagcatccgctcagtaacatgacggcaaccaaaagaaataagcgctgcatgattattttccttatgaagctggggcttaaaaatcggtactgttattttgtaaaccgctaacctggatggtgctggtttgtccggttttacgatctgtcacgttcaactgcaattgaccatcgcggttggcaatatcgacaatataatcgttggtcaccatgcggcccggtttaccggtattaatattgctcagtagcccacctaaaatttgactctggatggcctgagtaaagttatctaacgcactgggtgtttcaataccaaagtcatcgttatagctcggatctttataagagttttgggcctgagcgctatttaataaaaaagcgccattatttgggttaccaccaaagtttggattacggaactggaaagtcatggttccagcccaacttaatgggctaataagcatgagtagaactactgcatgtttgacacgcattgcagcctccgaacaattttttatttagaattcatcatgcgccaaatcgcccgtacttaataacgcctgatttatctggcgacgatttagtgcttcttcagtttgaatcagtgcaaagacgacagttttctcgaagtctcttttcaacggaaataaaaaagtctggaaaataacgtcctgattgaccgttatagtgatccagcttccccatcgtgcactgggcctttcattaatcgttaagttacccgtatagtcactttcccatttatcactaaaggctcggtaaaaatcatggccaatagaactaacagtatggtcagttagcaatcccgggacttctacctcaacggcgtgaagattccctgcggcgaacagaaattctgccgccacaatccagcgtaaataacgtttcatggctttatcgcctgaggttatcgtttgcccaggaaaccgcttgtgtccggttttttacggctatcttcttgaaaagattataaagatgcgttttaaccgtattttcgctgatgaacaagctacgagcgatctcgttattagacgcgccgatacgcagcttattcaggatctctttttcccgatgagtaaggagggcactttccgtgctgttataacgatagttaccactatgcgtaatcaggtagctggcaagcttttgcgtaaagtagcattcgccgcgcaggacgccttgcaacccattgacaacacgttcttgatcctccatggaataaaaaacgccgttgatatgaggccagttttcaatgtcgcggtacgggtaatcttcaggcgtatttagcaacaatattttgatattgttgtttttcctgctcaaagtatcctgccaataatggataagctttttatccgcttccatcatatccagaagaataatagagccactagagatatcgtccagagaacgttgaatattatgtaattttcctgtaattgccaggctttgtttaaggtgctgcaagagagctgtcgcctgcaaagaagatttagtgatcaacaataatgtatgaccatgaatactatggacttcattaaacatgatgaaaccccgctttttttattgatcgcacacctgacagctgcctctaaaatagaagcaccagaagtactgacagatgttgcactgctgtgtgtagtaataaatcagccctaaatgggtaaaatataaaactaatggattacatctgatttcaatctagccattacaaatcttaaatcaagtgttaaacatgtaactaaatgtaactcgttatattaaaatgttaaccttaaggttttattaagtttagaaatgatagaaaagttgtacatttggtttttattgcacaattttaaaaaatcatacaaatggtgataacttactaataatgcatataaaaaatatttcggtgtagtcctttcgtcatgtaaaacgttcttgttttttctccacacctccgtggacaattttttactgcaaaaagacgaggtttgtcacggcttgtgcgcaagacatatcgcagcaatcagcgacgggcaagaagaatgactgtctggtgctttttgatagcggaaaacggagatttaaaagaaaacaaaatatttttttgcgtagataacagcgtatttacgtgggttttaatactttggtatgaactaaaaaagaaaaatacaacgcgcgggtgagttattaaaaatatttccgcagacatactttccatcgtaacgcagcgttaacaaaatacaggttgcgttaacaaccaagttgaaatgatttaatttcttaaatgtacgaccaggtccagggtgacaacatgaaaaacaaattgttatttatgatgttaacaatactgggtgcgcctgggattgcagccgcagcaggttatgatttagctaatagtgaatataacttcgcggtaaatgaattgagtaagtctagttttaatcaggcagccataattggtcaagctgggactaataatagtgctcagttacggcagggaggcagtaaacttttggcggttgttgcgcaagaaggtagtagcaaccgggcaaagattgaccagacaggagattataaccttgcatatattgatcaggcgggcagtgccaacgatgccagtattagccaaggtgcttatggtaatactgcgatgattatccagaaaggttctggtaataaagcaaatattacacagtatggtactcaaaaaacggcaattgtagtgcagagacagagccaaatggctattcgcgtgacacaacgttaatttccattcgacttttaaatcaatccgatgggggttttacatgaaacttttaaaagtagcagcaattgcagcaatcgtattctccggtagcgctctggcaggtgttgttcctcagtacggcggcggcggtaaccacggtggtggcggtaataatagcggcccaaattctgagctgaacatttaccagtacggtggcggtaactctgcacttgctctgcaaactgatgcccgtaactctgacttgactattacccagcatggcggcggtaatggtgcagatgttggtcagggcagtgatgacagcagtatcgatctgacccaacgtggcttcggtaacagcgctactcttgatcagtggaacggcaaaaattctgaaatgacggttaaacagttcggtggtggcaacggtgctgcagttgaccagactgcatctaactcctccgtcaacgtgactcaggttggctttggtaacaacgcgaccgctcatcagtactaatacatcatttgtattacagaaacagggcgcaagccctgttttttttcgggagaagaatatgaatacgttattactccttgcggcactttccagtcagataacctttaatacgacccagcaaggggatgtgtataccattattcctgaagtcactcttactcaatcttgtctgtgcagagtacaaatattgtccctgcgcgaaggcagtagtgggcaaagtcagacgaagcaagaaaagacccttagtttgcctgctaatcaacccattgctttgacgaagttgagtttaaatatttccccggacgatcgggtgaaaatagttgttactgtttctgatggacagagtcttcatttaagtcaacaatggccgccctctagtgaaaagtcttaatttgttgaaatatcgagcataagatgaatctggagagaatggtctgctgcgaatcagccaacctgaaagtatggataacacaaccctcaaggatgactaatcattgaggaaatagaataaatgttcagaccttttttaaactctcttatgctcggcagtttgttttttccttttattgccattgctggaagcaccgtgcaagggggcgtgatccatttttatggccaaattgtggaaccggcatgtgacgtcagcacccagagtagtcccgtagaaatgaactgcccacagaatggttctattccgggcaaaacctactccagcaaagcgttaatgagcggcaatgtcaaaaacgcgcaaatagccagtgtaaaagtgcagtatcttgataaacagaaaaagctggctgtaatgaacatcgaatataactaagtttctgaacaactcacgttgctgagcagaaaaatgcgatttaaccaaaaagcctgctgtacacttaagaaacaagaaggtgtaaggaggcgttatgaaaacgcgtattcatgttgtgcagggtgatattaccaaactggccgttgatgtgattgtgaatgcggctaatccgagtttaatgggaggcggcggcgtcgatggggccattcatcgcgcagcgggtccggccctgctggatgcttgtttaaaagtcaggcaacagcagggcgattgccctacggggcatgccgttattacgcttgcaggcgatcttcccgctaaagccgtagtgcacaccgtcgggccagtctggcgtggtggtgaacaaaacgaagaccagcttttgcaggatgcctatctcaatagcctacgactggtggcggcaaacagctatacgagtgtggcttttcctgcaatcagtactggggtttatggttaccctcgtgcggcagcggctgaaatcgcagtaaaaaccgttagtgaatttattacccgtcacgctttacccgaacaggtatactttgtctgttatgatgaagaaaacgcccacctctacgaaagactccttacccaacaaggagatgaatgatttgccccggctggcgagcgcggtgctgccactgtgtagccaacatcccggtcagtgtggcctttttcctctggagaaaagtctggatgcgtttgccgcccggtatcgtctggccgaaatggcagagcatacgctcgatgttcagtattacatctggcaggacgatatgagcggtcggttactgttttccgccctgttagccgcagcaaagcgtggcgttcgcgtccgtttgttgctggacgacaacaatacgcccggacttgacgacattttacgcttgcttgacagtcatccacgcattgaagtccggctttttaatcctttcagctttcgcttgctgcgtccgcttggttatatcaccgacttttcccgtcttaatcgccgtatgcacaataaaagtttcactgtcgatggcgtggtgaccctggtgggaggacgaaatattggtgatgcctattttggagcaggggaggagccactttttagcgatttagatgtcatggcaataggacccgtggtagaggacgttgccgatgatttcgcccgctactggtattgcaaaagcgttagtcccttacagcaggtgctggatgtcccggagggtgaaatggcggatcgcatcgagttacccgcctcctggcataacgatgccatgacgcatcgttatttacgcaaaatggaatccagtccatttataaatcatctggttgatggaacattgccgcttatctgggcgaagacacgtttattaagtgatgatccggcgaaaggggagggcaaggcaaaacggcatagtctgttaccgcagcgcctgttcgatatcatgggcagtcccagtgaacgcatcgatattatctcttcctattttgtaccgacacgcgcaggtgtggcgcaactcttacggatggtgagaaaaggggtaaagattgcgatcctaaccaattctcttgccgctaacgatgttgctgtcgtccatgccggatacgcgcgctggcgcaaaaaattgctccgctatggcgtggaattatatgaactcaagccgacgcgtgaacaaagtagtacgttacacgatcgcggcataaccggtaattccggagccagcctgcatgctaaaacctttagcatcgatggtaaaacggtgtttatcggctctttcaatttcgatccgcgtagtacattgctcaatactgaaatgggcttcgtgatagagagcgaaacgctggcacagttaattgataaacgctttattcagagccagtatgatgcggcctggcagctccgtctggacaggtggggacggatcaactgggttgatcgtcatgcaaagaaagagattattctcaaaaaagaacccgccaccagtttctggaagcgggttatggtcagactggcgagcatattgcccgtggaatggttattgtaaatgtggcttaacgggctggtgctttatcgttctcacgcttaacaaccggtttaccagagaacaaaaacttcagtaacgggatgcgcaaatgaatttcatacagaattatcgcaatccctactacaaatatcaggccacagagaaaaccaagccagttggaggtgatgtgcggtgtaatgtatgcgccgaaaaacagcgttaacgggtggtgaaccagatagataaacaggcttgcgttaacaaaataagtcacccgcgcactctggaagttaagcaaacggtggccaaaggagaagaccacattcaccatccacagaccgaggaccatggtgatcacgctctcggtttcgtacatccaggcatcgccactgccatagcgctggttgagtaaataagcgacaaacgccaatgctgctgcaagggtacagccacgagacggcgtggtaaacaaggctttaagatgagggaaaatgaaagccagtgcgccgaggataaagaacggcaaataaaacagcgtttgcatgacaataaaattgaacatgccattactcagaatgggcggatacacaataaaaatcgttcttcttattaccgcataaccgatgccgaggcataaaaaaatcacgcttagttttaccatgctgaattttttattcgttttatcagaattttctaaattatttctgatgcgcttaaatatccatacgcacagcgtcgtcatgaccactaacaccagtaaaaaccacaggtgacttattaattcccaggccaacgtattatatttgtcatacaaactcagcccaggccaactttccgcttttcctttgacatattgcagcataataaattgcggtaatgtcagtagggggatggctgttaacatcgggatacctacacgttcgacacgtactttccaccattttttcaagggatagcgtaaaaaaagcatgtaggaaaagtagccggatataacgaaaaatacctgcatgcggaagctgtggatgaagtcattaaaaagggtcagccacaaactactttcggcgctattcacatgccatgtatggctgctatagattaaagaaatatgaaaaggtatccctaacaacatcagccaggcgcggatggagtcgaggaaatattcacgttgcgcgggtactgggttcatatatggttaactaatctcggatttttcgtcttatccctgtcgggttatgcctttaggcttgttgccatagtgacaccgacctgaccgcgccaggcgcaggcttcaaggtttttatgcatagcatcatcgctaccactaaccagaatggaagcgtctgtaagacggttgataaataaatttgctggcaaaccctacacgaagtcgatgcttctgtctttaggagaagcacggaaagtgaaaacggttgcaatcaggtgcttaatccatgagccagcgtgctgaacgataccgggattctgttgtcggaatggctggttatccattaaaatagatcggatcgatataagcacacaaagggggaagtgcttactaattatgaaacataaactacaaatgatgaaaatgcgttggttgagtgctgcagtaatgttaaccctgtatacatctagtagctgggctttcagtattgatgatgtcgcaaagcaagctcaatctttagccgggaaaggctacgagacgcccaaaagcaacttgccctccgttttccgcgatatgaaatacgcggactatcagcagatccagtttaatcatgacaaagcgtactggaacaatctgaagaccccattcaaactcgagttctaccatcagggtatgtacttcgataccccggtcaaaataaatgaagtgactgccaccgcagtcaaacgaatcaaatacagcccggattatttcactttcggcgatgttcagcatgacaaagatacggtaaaagaccttggctttgccggttttaaagtgctttacccgatcaacagcaaagataaaaacgatgaaatcgtcagcatgctcggggccagctatttccgcgtgattggtgcaggtcaggtttatggcctttctgcccgcggcctggcaattgataccgccttgccaagcggtgaagaatttccgcgcttcaaagagttctggatcgagcgtccaaaaccgactgataaacgtttaaccatctatgcattgcttgacagcccgcgtgcgacaggtgcttacaaattcgtggttatgccagggcgtgacacggttgtggatgtgcagagcaaaatctatctgcgcgataaagtcggcaaactgggggttgcaccgttaaccagtatgttcctgtttgggccgaaccaaccgagccctgcaaataactatcgtccggagttgcacgactctaacggtctctctatccatgccggtaatggcgaatggatctggcgtccgttgaataacccgaaacatttagcggtcagcagcttctccatggaaaacccgcaaggctttggtctgttgcagcgcggtcgtgatttctcccgctttgaagatctcgatgatcgttacgatctccgtccaagcgcatgggtgactccgaaaggggagtggggtaaaggcagcgttgagctggtggaaattccaaccaacgatgaaaccaacgataacatcgtcgcttactggacgccggatcagctgccggagccgggtaaagagatgaactttaaatacaccatcaccttcagccgtgatgaagacaaactgcatgcgccagataacgcatgggtgcaacaaacgcgtcgtagtacgggggatgtgaagcagagcaacctgattcgccagcctgacggtactatcgcctttgtggtcgattttaccggcgcagagatgaaaaaactgccagaggataccccggtcacagcgcaaaccagcattggtgataatggtgagatagttgaaagcacggtgcgctataacccggttaccaaaggctggcgtctggtgatgcgtgtgaaagtgaaagatgccaagaaaaccactgaaatgcgtgctgcgctggtgaatgccgatcagacgttgagtgaaacctggagctaccagttacctgccaatgaataagacaactgagtacattgccgaagactgatatccgcgccgttcatcaggcgctggatgccgaacaccgcacctgggcgcgggaggatgattccccgcaaggctcggtaaaggcgcgtctggaacaagcctggccagattcacttgctgatggacagttaattaaagacgacgaagggcgcgatcagctgaaggcgatgccagaagcaaaacgctcctcgatgtttcccgacccgtggcgtaccaacccggtaggccgtttctgggatcgcctgcgtggacgcgatgtcacgccgcgctatctggctcgtttgaccaaagaagagcaggagagcgagcaaaagtggcgtaccgtcggtaccatccgccgttacattctgttgatcctgacgctcgcgcaaactgtcgtcgcgacctggtatatgaagaccattcttccttatcagggttgggcgctgattaatcctatggatatggttggtcaggatttgtgggtttcctttatgcagcttctgccttatatgctgcaaaccggtatcctgatcctctttgcggtactgttctgttgggtgtccgccggattctggacggcgttaatgggcttcctgcaactgcttattggtcgcgataaatacagtatatctgcgtcaacagttggcgatgaaccattaaacccggagcatcgcacggcgttgatcatgcctatctgtaacgaagacgtgaaccgtgtttttgctggcctgcgtgcaacgtgggaatcagtaaaagccaccgggaatgccaaacactttgatgtctacattcttagtgacagttataacccggatatctgcgtcgcagagcaaaaagcctggatggagcttatcgctgaagtcggtggcgaaggtcagattttctatcgccgccgccgtcgccgcgtgaagcgtaaaagcggtaatatcgatgacttctgccgtcgctggggcagccagtacagctacatggtggtgctggatgctgactcggtaatgaccggtgattgtttgtgcgggctggtgcgcctgatggaagccaacccgaacgccgggatcattcagtcgtcgccgaaagcgtccggtatggatacgctgtatgcgcgctgtcagcagttcgcgacccgcgtgtatgggccactgtttacagccggtttgcacttctggcaacttggcgagtcgcactactggggacataacgcgattatccgcgtgaaaccgtttatcgagcactgcgcactggctccgctgccgggcgaaggttcctttgccggttcaatcctgtcacatgacttcgtggaagcggcgttgatgcgccgtgcaggttggggggtctggattgcttacgatctcccgggttcttatgaagaattgccgcctaacttgcttgatgagctaaaacgtgaccgccgatggtgccacggtaacctgatgaacttccgtctgttcctggtgaagggtatgcacccggttcaccgtgcggtgttcctgacgggcgtgatgtcttatctctccgctccgctgtggtttatgttcctcgcgctctctactgcattgcaggtagtgcatgcgttgaccgaaccgcaatacttcctgcaaccacggcagttgttcccagtgtggccgcagtggcgtcctgagctggcgattgcactttttgcttcgaccatggtgctgttgttcctgccgaagttattgagcattttgcttatctggtgcaaaggaacgaaagaatacggcggcttctggcgcgttacattatcgttgctgctggaagtgcttttttccgtgctgctggctccggtacgcatgctgttccatacggtcttcgttgtcagcgcgttccttggctgggaagtggtgtggaattcaccgcagcgtgatgatgactccacttcctggggtgaagcgttcaaacgccacggctcacagctgctgttagggttagtgtgggctgttgggatggcgtggctggatctgcgtttcctgttctggctggcaccgattgtcttctcgttgatcctgtcaccgtttgtttcggtgatttccagccgtgccaccgttggtctgcgcaccaaacgctggaaactgttcctgatcccggaagagtattcgccgccgcaggtgctggttgataccgatcggttccttgagatgaatcgtcaacgctcccttgatgatggctttatgcacgcagtgtttaacccgtcatttaacgctctggcaaccgcaatggcgaccgcgcgtcaccgcgccagtaaggtgctggaaatcgcccgtgaccgccacgttgaacaggcgctgaacgagacgccagagaagctgaatcgcgatcgtcgcctggtgctgctaagcgatccggtgacgatggcccgtctgcatttccgtgtctggaattccccggagagatattcttcatgggtgagttattacgaagggataaagctcaatccactggcattgcgtaaaccggatgcggcttcgcaataaaaacgtagttgcctgatgcgctacgcttatcaggcctacatcgttcctgcaatttattgattttgcaagactttgtgggtcggataaggcgttcacgccgcatccggcaaaaacaacgagccaataaaaataccggcgttatgccggtatttttttacgaaagaggtatcaaatgcgtttaattgtggtgagcatcatggtgaccttgctgagtggctgtggcagcattattagtcgcactataccggggcaggggcatggcaaccaatattatcccggtgtgcaatgggatgtgcgtgactccgcctggcgttatgtcacgatccttgatctgccattctctctggtttttgatactttactgctgccgatcgacattcatcatggcccgtatgagtgattaacgttcatcccactcatcagctgctgcgcgtccttcctcggtatccagcggtggctcaagctgaaattccccctcgtcccattcatgtaatgtattctcttcctgccactcctggcgtatctctatctcatcatagtcgccatcaaaaacactttgcgcggcttcaccgctaagcataggtaaacattcaccttcttccccttcgtcggcaaaaaactcaacttgccacatgatgtcgccgtcctgcaaaacgtatttttgggcattgaactgttgcacattcgcatcttcggcgtcgatgccggggttgtctgcaagaaattcttcgcgtgcagcgtcaatggcttcttcaagcgttgcgtacatggtcatcacgattctccctttgagttgatgaggtttcagggaaaaggatagctgattctccgcttttgcaagtatgaaaggcgaaaaatcagttgcttacctggggtattcgacgacgacgtagactgttccaactatagactgcgttgaataacactacgccagcggtgacgagaaataccgctctgaaaccgtagttcgcactaatcgctgctcccatcaatggtccggtaacgttgccaatatcacgaaagctttggttatagctgaagatacgcccggcgatctggttgctgctgttgtaaaccaacagtgtctgtacggcggggagtagtgcaccatcggcggcaccgagcaaaaaacgtaaaatcccaagttgcaatggcgtctgaacgtaagacattgggatcaacagcagtacagaaaagatcagcgctgtaatcaggatcttttcgggtccgattcgatcgccaagtttgccgagtcgtggtgcacttagcagagccgccacgcctggcacgctggcgatcatgccactgataaaggcgacgttactgacgttacccgccagttcgcggacatacagcgtcagaatgggggcaatactgcccgtcgccacctggatgattaacgtagtgacaaacaggctgagtaccagtttcgggtttttaagacttgtcaccacttcccgcatgtgcagcatctcttttttgctgaccggctggaatttttctctgatgcaaaacagggtgacgaaaaagcagagtatgagcacactggcggtaataaagaataccggacgtaagccgtagctatcggcgagcaggccgccagccattgggccgagcaacgcaccactaacgccgcctgtggagagcgtacccagcgcccagccgcttttattacgcggtacttgtgtggcgataagagcattagcgttggggacaaatccgccaagtaacccaagaagcgcccgcaggatcaaaaactgccagatattttgtgccagccccatcaacaccatcacgatgcccatgccgagggcagagcgtaatagcatgagttttcggcctttacggtcggcgagtccaccccaaaacggactggcgatggcgctaaataaaaatgtaatgctgaagacaataccggaccacatattcagggcggagtgaccggtaacgccaagctgctcaacgtagaggggtaagaagggcattaccagactgaaggcggcaccggtaagaaaacagcctagccaggcgacgatcaggtttcgtttccagtttataggggtgtcattttcacagggactcatagcaatccgctgttggtgcgccaggcgcggtgaacataagaagaaaagataagcacactaattatgcgcccgacttccagggggcgcaatccagagagcttttatcgctaaatcagggggatttgctgtggtaatgccggatgccattctgaagcatccggcatgggagatttaatagcgactaggaacgccttccgggcgtgttttaaagcgacggtgtaaccacatatactgctctggtgccatcatgatgcatttttcgaccactttgttcatccacgcggcggtagtttcggcatcatccagtggcggagaacactctggcggcagcataatcaattgataccctttgccatctggcttacggcgtggaacgaagggcaccagacatgcgccggacatccgtgccagcatccaggttccggtcgtggtcgcagcctgctcaacggcaaacaacgggacgaaaacgctactgcgcgggccgtaatcatgatccggtgcgtaccagaccacttcgccttttttcagggctttaatcatgccttttaaatctttgcggtcgagcatgcttttattactgcgcaaacggccccaggtttgtagccagtcaatcagtggattatcgttcgggcgataaacgccaatacccggttcctgcataccaaactgccgcgcacccagctccagtgtcagaaaatggatgccaactaacaggatgccgcgtttttgcgcctgcacgtcacgaatgtgttccatgccgatcacttccgtccagcgggcgattcggcggtccggccagaaccacgccatgccggtttccatcaggcccatgccaacggattcgaaattcttcaccaccattttacggcgttcttgttcgctcatttccgggaagcacagttccaggttgcgatgcacaatttttgcgcgtcgtttcataaaacgtaacgccagttttcctaatccacaaccgaggcggtagataaccgggtagggcaattgcacgactaaccaaagtacgccaatacccaaccaggttaaccaataacgcggatgaagcagtgcggtggagaacttgggtagattcgtcatatcaatcctgtttttcaacctattcgggcaattgtatgtattgtcgcattttttcgcccgcaaccaaaatttgtggctgaagactgggcgaaattgccgcgcttgtaaataacaaataatttttaatgcgcaaatgtagcgtaaaatgtgtggatgttaattatcgataattgctatatcatgccgcggatttttactttcccatctcgcaggaaccgtacaccatgccagtgttacacaaccgcatttccaacgacgcgctaaaagccaaaatgttggctgagagcgaaccgcgaaccaccattagcttttacaagtatttccacatcgccgatcctaaggcgacccgtgacgctttatatcagctgtttaccgcgctgaatgtttttgggcgagtgtatctggcgcatgagggcattaacgcgcaaatcagcgtacctgcgagcaatgttgaaacatttcgcgcgcagctctatgccttcgacccggctttagagggtttacgcctgaatatcgcgttggatgatgacgggaaatccttctgggtactgcgcatgaaggtacgcgatcgcattgttgccgacggtattgacgatcctcactttgatgccagcaatgttggtgagtatctgcaagcggcggaagtgaacgccatgcttgacgatcccgatgcactatttatcgacatgcgtaaccactatgagtatgaagtggggcactttgaaaacgcgctcgaaattccggcagataccttccgtgagcagctgccaaaagcagtcgagatgatgcaggcacataaagataaaaaaatcgtcatgtactgcaccggcggcattcgttgtgaaaaggccagtgcctggatgaaacataacggattcaacaaagtctggcatatcgagggcggaattattgaatacgcccgtaaggcgcgcgagcagggcttgccggtgcgttttattggcaaaaattttgtttttgacgagcggatgggcgaacgtataagcgatgagattatcgcgcattgccaccagtgcggcgcgccgtgcgacagccataccaactgtaaaaatgatggctgccacctgctgtttattcagtgtccagtatgcgcggaaaaatacaaaggttgttgtagtgagatttgctgcgaagaaagcgcgttaccgccagaagaacagcgacgccgtcgggcaggacgtgaaaatggcaataagatctttaataagtctcgtggacgtctgaatacaacactgtgcattcctgatccaacagaataaatatcattgccggatgcgtgccatccggcaacatttcacgcttacttctgctgtacgccttccacactaataatcagatccacttcctgagaagctggacctaaatctgtcttgatattgaagtccttgagcttaattttgccttcggcctcgaagcctgcacgtttaccaccccatgggtcgtcgccctgaccaattaatttcgcttccagcgtgacgggtttggttacgccattcagcgtcagatcgccggtaatatccagttcgtcaccgtctttcttcacgctggtggaggtgaatgttgcctgtggatattttgcggtattgaggaaatctgcactgcgaagatgtttatcgcgttcggcgtgattagtatcgacgctggtggtgttaattgtcacattcactttatcggcagccggatttttttcgtcaaaggtaaaagtaccgtcgaaatctttaaaggtgccgtataaccagctatagccaaggtgctggatgcggaaattaacaaaggcgtgctgaccttctttgtcaattttgtaatcggcggcaaccgcactaccggcagagaacatcagggacgcgaaggttaaaccaagcaggctttttttcattttttatactccatagtcagaactgctctttcccagcatgcgcttcagagtgtcgtctttatcgatgaaatgatgcttcagggccataaatccgtgcataacggacagtactacgacgctccacgcgagccaaaaatgcagggcaccggcaaagtctgcctgtgcgccagcgtcggcaagggtcgcggggacgtcaaaccagccaaaaacgctgatcggtttaccatcggcagtactgatcagatagccgctgatgccgatggcgaaaagcaataggtacaatgcgagatgtccagctcttgcggcaagacgagtcatggggctataactcggcagcggacccggcggtggagatatgacacgccacagaacgcgaataaccagccccatcattaacaaaataccgatgcttttatgcagttcgggtgctttgtgataccagccatcgtaataactgagcgtgaccatccacagacctaaagcaaacatgccgtagacaataattgcgcttagccaatggaaggccgcagatataacaccatagcgttcaggggtatttgtgaaactcataagtgcatccaaaacgaatttgcgagagaaagaaaatggcgtgtcggagaatgaattgcaacacaaaaataacaaattgaatgatatttatttttatttcaataattttgaattaataatgaaagaatcttcataagtttagtgggttcagcatcagagatgtctggtgagtgctgtagaagcaggaataatctcattcaatttttcacgctaaatgaaagggagattaaatatttgtcagtttatgtcagtgcggaaaattaaaaataaaacacatagatcagatccataattgccaacaatccccagagaaaaagataaagcatcagatgctcgcgaatattattgatgagatagtgcaacagccgacgcattaaatactcctgtaaaaacggcctcattctggaggccgtaatgatgattattggaagcgggaaagcctgaatggcgtcaaatcaaaatcgctttttttgtcttgcgcaaaatcggcagctatttcccctaaaacactcgcaaatttaaaaccgtgcccactcaggccggtaatgagcagtgtattatcgtggccgggtagggtatcgataataaaatcttcgtcagggctattatcataggtgcaggcagcgccgtacaggcagcaaccgatacccggcaatacattgcgcaagaacgggaaggcttcactcccatcactggccacttccgcaaacggaacacgttcatccgcactatggataacctggcctccgttatgtttgccaatcttcaacgcgtcgttttctgccggaaaaccataatattgatcgccattgggcagttcaccggtaaacgccgggaatttattcttcacgctatagcggccatcggcctgataccaggcaaatactttgcgtacgggctggacaggcagctccgggagcaggtcttttacccatgttcccgcgcagacaatcgcttttttcgcctgatactcaccgtcagccgtttcaatagttacgccatcatcgtcatgacgaattgcggtgaccgggcagttgaacagttgcgcacagcccgcttccttcgccagttggatccaggttttaatcgccagttcgctgcgcaaaaaaccggaatcagtttcaaataagccgatgtagttgtccgggacgcgtatttccggccagcgggccataatcccttgcgcatcgagcttttcaacgttgagttgccattgttcggcgctgtgggcgacgttggcgagaaatgtggaatcagccgggccaaggttaatgacgccagagcgtacaaaaatgggatcttcttcgttgtggcgggagagttcatcccacagcgtttgcgcgcggaggaccagcgggacatacttttcgccttcaccataagcatggcgaattaatcgcgtatcgccgtggtggctgccgtgttgatgcggtggcatatgggcgtcggtcattagcacgtttaaaccggcgcgggttgcataatacccggcggcagcgcctacggaaccgctgccaataatgatgagatcgtatttcatttttttctctctgctctcatggtttaagcagagtaattaactgaatgcagatatacaacccagaaatggtaaaggcaccggtgaggtgccttttgggtggatggtcatgtcatgttaatgacgccgatactcgtttacctggaaatcaccggattcaattttggcgattcctgcttctaatatgctaataaattgtctggcaacatcagtggttaaccagagcgtctgaccaacttcagtcccttcctgctcggacttatttggggtctggtagtgcaaacgcaacatcagcgcatcatagctatcaacggtgctgatgtcccaccctacgagcggatgagtctgaatgacttcattatttttttccatcatggccccctaattcgtgttactagacaacgttattcgaggttcaatgcgtttttatctgaagcaacttcagtataccaataagtaagggtattcaccgaatttttaaagggggaaacagataaatttctgcttttaagatttatatgaacaataaaacagcatgtcattcatatttttttagcatattgtgcaattattttgaggaagtgtagaaattttgtactcaaaattcgtaagtaaaataaaaaagccggggcgacccggcaaaaaaaatcactgcatattattcgctgacaaaccagtcatcggcgctttcccacgtttcctggagaatttcactaatgcgctgtttatcttcttttgtcgcgccaataacgcttaaattattcgctgcggcataacgtacgcttacgtggccttcattatcaggaaacgcatactgaatacggcgggaaagttcgccagccagggcgtcaatagccccagctggcaatggagaagttttcgctatggtgacttcaattcgcataatagccccctgttgaatatactggttatttatacaggtaaaataacctaatgacaacaggaagctacgatttttattgtttaacggaccagcgtaccgtttccccggcgaggaatggcaccagcgtgtcatcagtcagtgcgatgctttcagcaacctgttgctcttcacgtaccagttcgatgaatgtgtcgttgaccggcaacccatagaactgcgggccgtttacagaacagaatgcttcaaagtgctgcaaagcattcatttcttcaaagacggtagcgtaactgcccagcgcggttggggcgttgaagcagcccgcgcagccgcaactgctctctttgcgatgacgtgcatgtggcgcagaatccgtaccgaggaatactcgattaaaaccgctggcgaccagttcacgcaatgcctgttggtgaatattacgtttgaggatgggtagacaatacaggtgcggacgcacgcctccaaccagcatatggttgcggttaaacatcagatgctgcggagtgatggtggcagccagccgttcatttccgtcacggacatagtcggcagcatctttggtggtgatgtgctcaaaaacgactttcagcgcagtcaggcgctggcgcagaggttccatcacgctttctataaagcgcgcttcacgatcaaaaatgtcgatatctgcatgtgtcacttcaccatgcaccagtagcggcataccgattttttccatgcgctcaagtaccggcatgattgcgtcaatactcgtcacgccgtggctggagttagtggttgcgtttgccgggtaaagttttgcagcggtgaacacgccttcgttaaatccgcgctccagctcattaggatccaggctatctgttaaataacaggtcatcaatggggtgaaatcgtgcccggcaggtacggcgtcaagaatacgctggcgatacgccacggcagcctcaacggtggtcacgggcggagccagattgggcattacgatagcccgtccataaatttcgctggtatatggcacgacagtttttaacatgtcgccatcgcggaggtgaaggtgccagtcgtctgggcggcggatctttaatacctgggatggtgcagtcattaatctctatgctccggctgaagggatgtttttgccggacacaaaggataagcggaaacgttttcctttgcacgaaaaataaagggcgcgaatgcgccctcgtgattaatcagtaaatggaatgacaatttcgcctggcttcacttcaatgcctttcgccagttttttcgccattgcttcgccctggctgccatcttcgcgcaggacgtaagcaggttgctggttaaagtaattgcgtaatgcctggttcaaatagggaagcaacgtttgcatcaccgtttgcattttttccggttgtaccgtcgcatcgaccacttccatctctttcaggaagatcgcacctttttctttatcaaacacgggcagcgctttcagcttcagtttcatggtcgctttctgactaccgaacagggagttcatgtccagattggcgtctccggttagggtaaccttattcggctcttcgcgaccaatttggctggtcaggtttgtcagaacaatatgggcgtcagccacgccgggtaaaccgatatctttactgaaattattatgtttcgcaaggctctggttaatttcttgttcggtgatggtgtattgggtgagttgattacagccaacgagcaggccactgacgatcaatgcagcggcaaataaaaacttgttcatggtagtcctcgacatgaaatctgcgtcaatatcctgacacaacgcagcatgtgtcaccagcgataaactcgccagcagaaaaaactgaaaacggcggcaacccgcgaatacaggctgccgcggcgggtcaggattaaatcgccatactacttaacaaattgatttgtgtctgtttcgccatattatcgcggtaatcagcaacgcggcttggccagttaattccggctaccagcgtcagattacgcagtagcgggaatagctgaatatcatcttcgctaagttcgccattcacggcgttcggtttgacgatcagtttgtccagcgcacgtaaatcatcgctgatattcttaatcagaccgtcagagtgggccagcaggtcggcaaaattacccgcgctggcctctttcttgtcgacgaaatatttgcgcgcggcgggagtagaaaactcatcaaatgcgcttttggcaaaacgcggcaacagcagtttgttggcgtagccattgaccttgcgcagccactcttcaatggcaggggaacgtttgccggtcagtaacggtttgccgtcgagtttatcgacatagtgaacgatgtccatgctttctggcatatagcggctgtcatctttttgcagaatgggaacctgtttttgaccgaccatccgggtgggtgtttctgcgtcgtcgttgagcagaacatgtaattcgacggggatatttttcaggccgaaaatcatgcgggctttgaggcagtaagggcagtgatcgtaaatgtatagcttcacgtgactcctccatttggctgtcagttcactttcagtatgaaggagtcaggggggagtatcaaatcaggcgtcgcgttcaagcaaacgacgcgcggcgcgtttctggctaaactgccaacccagcgcaaggaaagtgaagatgccaataatgcccagcatcatccacggaagctctggctggtgcgcgcttttgcccaggtcaaacagccagccgccaccgatataaccaatagcgccgccaatcgccagacccagacggctaaaccccatatagctgccgcgagctcttgcgtccgccaggctagcacttaaggtttcacgcgcaggctcggcaatgatgctcccgatataaaacagacaaatcagggtgaaaagttgttgcaggccgctgaccatgcccaccggcatcatgcttaaactcattatcaacagcccagccatcaaccggtgttccagacgaaaatgcttttcactccagcgggcgatagggtagagcaacgttaagctcagacacgcttcaatggcatacatccatttaacggcagagggcgcgcagccacgtcgttgaccataattggcagcatcagcatcacttgtacagccagcatgtagtaacccgccagcgtcagaacataggtgacaaaacgcttgtcacgcatcacgcgggtcatgccttcgcgaacgggcgtgcgtacggtggagagtttccatgctggtaacaaccacgcattgaacgccgcacatagcacaaatagaactgcccctgtggcgcagaccaggcgaaagtcgtattgcaacagccagctccccaacaatgcgccaatgaccgcaccggcactgtcctgcatcatcaacaggctgaaaaaacgaccacgctgctgtggacggattaatttcaccaccagcgcgctacgcggcggatcaaacaacgtgccaccgagtccgctgagcaggcaactaaaccacaatagccacggttcgtgggcgatacccattgtggcgaatccggcggcgcgcatcagcataccggtaacaatcatcggtttggcaccaaagcggtcggcaattgcaccgccgaaaatacccagaccttgctgaataaattggcgtagaccgagagcaataccgaccatgacggcggcccagcccatttgatcaacgaagcggatagagatcagcgggaagacaacaaagaaccccagcacgaccagcatattatcgatgagcaggaaatatttacccaggttcctcgcctggctcacgcgggacatttcccctcccgggaaataaaagatgagcactttctattctgcattgccgctaagacttttcccatcacttcggggacaatatttttttatcaaaacgtcgctttgatagagagtttttatcaaatatgtgaataatgcagaaaatggcattttggacttttcacagggtctggttgcgcaggtatagtaatacttacagcgtattaaagacgttacgggaaggagtaggtatagaatgtttggctatcgcagtaacgtgccaaaagtgcgcttaaccacagaccgactggtcgtgcgtctggtgcatgatcgtgatgcctggcgtcttgcggattattacgcagagaatcgccatttcctcaagccctgggagccagtgcgcgacgaaagccactgttatccaagtggctggcaggccaggctggggatgattaacgaatttcataaacaaggtagtgctttctactttggcttattcgacccggacgaaaaagagattattggcgttgccaatttttccaatgttgttcgtggctcttttcatgcctgctatctcggttatagcattgggcaaaaatggcagggcaaaggactcatgtttgaagccctgaccgcagccattcgttatatgcagcgcacccaacatattcatcgcattatggctaattatatgccgcacaataaacgcagcggtgatttactggcgcgactgggttttgaaaaagaaggctatgcgaaagactatctgttgattgatggacaatggcgcgatcacgtactgacggcattaactaccccagactggacgcccggccgctaaggagaatctcatgaaatatcaacttactgcccttgaagctcgcgtgattggttgcttgctggaaaagcaggtgaccacgccggagcaatacccgctcagtgtcaatggtgtagtcacggcctgtaatcagaaaacgaaccgtgaaccggtcatgaatctgagtgaatccgaagtgcaggaacagctggataatctggtcaaacgtcattatctacgcacagtgagcggttttggtaatcgggtcaccaaatatgagcaacgtttttgtaatagtgaatttggcgatctgaaactgagcgcagcggaagtggcgttaatcaccacgttgttattgcgtggtgcccagacgccaggtgaactgcgcagccgcgccgcgcgaatgtatgaattcagcgatatggcggaagtggagagcacgctggaacaactggcaaatcgcgaagatggtccttttgtggtgcgtctggcccgcgaaccgggtaaacgcgaaaaccgctacatgcatcttttcagtggtgaggttgaagatcagccggcggtgacggatatgagcaacgcggttgacggtgatttacaggcccgcgtcgaagccctggaaatcgaagtggcagaactgaaacagcgtcttgatagcttgctggcccatctgggagattaaagtgaaaaaattacgtatcggcgtagtgggattaggtggcattgcgcaaaaagcgtggttaccggtgctggcggcagcgtctgactggacgttacaaggagcctggagccctacgcgcgcgaaagccctgccaatttgtgaaagctggcgcattccttatgccgatagcttatccagccttgccgccagttgcgatgcggtttttgtgcattccagcaccgccagccactttgacgtggtcagtacgttactcaatgcgggggtacatgtctgtgtcgataaaccgctggcagaaaatctgcgcgatgctgaacggctggtggaactggcggcgcggaaaaaactgacgttgatggtcggttttaaccgtcgtttcgcaccactctacggtgagttaaaaacgcaactcgccaccgcagccagcctaagaatggataaacatcgtagcaatagcgtcgggccacacgatctttatttcacgttgctggatgattatctgcatgtggtggataccgcgctgtggttgagcggcggcaaagcctctctggatggcggtacgctactgactaacgacgctggcgaaatgctgtttgccgagcaccattttagcgctggtcctttgcagatcaccacctgtatgcatcgccgtgccggaagtcagcgtgaaaccgtgcaggccgtgactgacggtgcgctcatcgacattacggatatgcgcgaatggcgtgaggagcgcgggcagggcgtagtgcataaaccgattcctggttggcagagtacgcttgagcaacgtgggtttgtcggctgtgcgcggcacttcattgaatgtgtgcaaaaccagacagttccgcaaaccgccggcgaacaggccgtgctggcgcaacgtatcgttgacaagatctggcgcgatgcgatgagtgaataaaccctgtaacatctggcggtagcaattcaccataatccaggtagactattcgcctctttcagcgcctgccttgcaggcgttttgcccgtgggtctggattagaacaccgatgaatttattaaaaagcctggccgccgtcagcagcatgaccatgtttagccgtgtgcttggcttcgcacgagacgcaattgtcgccagaatctttggcgcagggatggcaaccgacgcctttttcgtcgcttttaaacttcctaacttgttacgccgtatctttgccgaaggggcattttcccaggcatttgtaccgattctggcggaatataaaagtaagcagggtgaagacgccacgcgggtctttgtctcttatgtttctggcctgctgacacttgcgctggcggttgtgacggtcgctggcatgctcgccgcaccgtgggtgatcatggtgaccgcgccaggcttcgctgacacagctgacaaatttgccctgaccagccagctactaaagattacctttccctatatcttgctgatctccctggcgagcctggtgggagcgattctgaatacgtggaaccgcttcagcattccggcgtttgctccaacactgcttaacatcagcatgattggtttcgcgctgtttgccgcaccgtactttaacccaccggtgctggcgctggcgtgggctgttacggtcggcggcgtcctgcagctggtgtatcagctaccgcacctgaagaagatcggcatgctggtcctgccgcgcattaacttccacgatgccggagcaatgcgcgtggtgaaacagatgggaccggcgatccttggcgtctctgtgagccagatctccttaatcatcaacaccatttttgccagctttcttgcttccggtagcgtgtcttggatgtattacgccgaccgcttaatggagtttccgtccggtgtgctgggcgtggcgcttggcaccattttgctgccgagcctgagcaaaagttttgccagtggcaatcatgatgaatacaaccgtttgatggactgggggttgcgtctttgtttcctgttggcgctgccgagtgcggttgcgttgggcattctttccggtccgttgaccgttagcctgttccagtacggtaaatttaccgcgtttgatgcgctgatgacccagcgggcgttaattgcctacagcgtgggtttgattggcctgattgtagtgaaagtgttggctcctggcttttattcccgccaggacattaaaacgccagtgaaaattgccatcgttacgctgattttaacgcaattgatgaacctggcgtttattggtccgttgaaacatgccgggctgagtctttctattggtctggcggcgtgtctgaatgctagcctgctttactggcagttgcgtaagcagaaaatctttaccccgcaacccggctggatggcgtttctgttgcgtctggtggtggcggtactggtgatgtctggcgtgcttttaggtatgttacatatcatgccggagtggagtttgggtaccatgccctggcgtttactgcgtttaatggcggtcgtgctggcggggattgccgcgtacttcgctgcactggcggtactgggcttcaaagttaaagaatttgcccgccggacggtgtaacaatgcattccggcctgcagtgttcgctttaaaacatatcatgaaactgggtatgttttgtctgcctgctctgggatcgctggggcgggcatttttttgcctattttgcattgttggttagcaaggatgccattcgatgaattttaatatgttgattcaaagatgaaataaaaaagccctggcagttaccagggcttgattactttgagctaattattactcaacaggttgcggacgcgcaggagcggcagaggcatgatgtgttgccgtatgaccacctgcggcacctttaccttcgaaggcaaaagtagggcgctgccagtcactgtgacgcggtgcctccggaacatattccggtgctggagcgcgcgtcattggcgcggtagcgtggttatgctcaacggtgacctcaggttcgaccgcagctaccgtttcaacttctgctgcgacttcagcgactactggcgcggcaggttgagcaacaacttcaggttcagcaactacaacctcagcagtttcgacaacttcttcaatatctgccgtctcttcctgcggttcaaccaccggttctgcttgttctgcaacttcctgggctacggcaacatcagactcggtaatcacctgcggctgttcagttaccgcggcagcgatcacttcaggatgcgtcgtttcaaccacttccggttgcggttcggcaacctgaacgggggcttctacgacaccggccacttcttcaacaactggcgcgctaacaaccggttcgatagcggcggcgacagggacctcagtcaccatcggctgcacatgtacttcttcctgttcgcgctgctcttcaacctgtacatcttgcggacgtacaattggatagcggatccagactttgccagaggccagttccggagacgcgcacgctacggtcaacggcattgggctctgggttggataacgctcgtcacgatagcgacgacgacgctgaccacttacgcgcaggtgacgagggctgcggcgagaacgacgcggcatgccaccgttgtcacggttatcagcattgttctcttcttgctgttctggtgcagtttgcgctacgactggcagcgggactttcaccagttctgtgcgtggagctggcgcttcctgaacaattggttcggcagcgacagtttcttcaaccaccggtgcgactaccgcttcttcggctacgctttgctcgtaacgcactttctgattgagctgacgctgtttacgacgcggctgaaccggacgtacacgttcttcctgttcggtttcctgaacagattgctcttcaacattcagcgccttcgcttcttgttgcgcctgacgtttatcatcattacggcggcggctacgttcacgacgcggcgcttgctgctcgtcggcggtacgcgctttttccgttacctcagcctgctgacggctctcacgcgtctcggcagtctgctgctgtgcctggcgacgattacgacggttttcttcgcgattatcgctgccttcagtacgttcactacgggtgtcgcggcgctcattacggtcacggcggttgttctgacgaggcttgcgacgatcctgttgacgttccggtttcgcttctgctttcggtgctggttgctcggtcggtttggtttcttcaccaccgctgaacagcgctttcagtgcgccgaagaagcggctcaacagcccaggttgtgcaggagctgctggtgttgccggtgcagctttcggtgctggagctacaacaggcgcggcaggttcagctggcgttggcgcaggcggcacatccggcatggcaaaggttgccagcgcaggttgttccggacgcttacgttcagcgaactcttcttcagacggcagcgccatcgcttcttcatgcagcttcggcagcatgtagcttaaggttggggtttcttcccctttacgcacgcgcagcacgtggtagtgcggggtttccatctgatcgtttggcacaattacacagcgcacaccgtcctgacgagtttcaatggcatttaccgcagaacgtttttcattcagcaggtaagaagcgattggcacaggaacaatggcgtgaacttcctgggtgttctctttcagcgcttcttcttcgatcagacgcagaatagagaggctcaggctttcgttgtcacgcacggtgccagtaccagaacaacgcggacaaacgtgatgactggattcacccagacttgggctcaggcgctgacgggacatttccagcaggccaaagcgagaaatatggctgatttgaatacgcgcacggtcctgacgcaccgcttcacgcagacggttttctaccgcacgctggtggcgtactggcgtcatgtcgatgaagtcgataacaatcaggccgccgaggtcacgcaggcgcagctgacgagcaatctcatcggcagcttcgaggttagtgttaaacgcggtttcttcgatatcgccgccgcgggtcgcgcgtgcggagttgatgtcgatggccgttaacgcttcggtgctgtcgataacaatggaaccaccagacggcagacgaacttcacgctggaaggcggactcgatctgactctcgatctggtagtggctgaacagcgggatctcgccggtgtacagtttgattttgctgctgaaatccgggcgacctaatgcagcgatatgctgacgtgccagttcgagcactttcgggttatcgataaggatttcgccgatgtcctgacgtaagtaatcgcggaatgcgcgaacgattacgttgctctcctgatgaatcaggaacggggccgggcggctttcagcggcttttttgatggcttcccagtgtttcagacggaagcttaaatcccattgcagcgcctcagcagatttgccgacgccagcggtgcgcacgataagccccatgccttccggcagttcaaggcttgccagtgcttcttttaattcggtacggtcgtcgccttcgatacggcgagaaatgccacccgcgcgcgggttgttcggcatcagaaccagatagctacccgccagactgataaaggtggttaatgccgcgcctttgttgccgcgctcttctttatcgatctgaacaatgacttcctgaccttcacgcaacacatctttaatgttgggacgaccatgagcactgtagttagcagggaaatattcgcgggcaatttcttttagtgggaggaaaccgtgacgttcagcgccgtaatcaacaaaagcagcttccagactcggttcaatgcgggtgattttacctttgtagatgtttgcctttttctgctcgtgccctggactttcgatatccaggtcatacagacgctgcccatctacaagggcaacgcgcaactcttcctgctgagttgcgttgattaacattcttttcatcgtaacttactcattattcttacattgacgactaagctgcgggcaaagtaacgcctttccgggtgtgaaccgatggcctcgtgtctagtcgcgtcgccaacctcacggttatcgtcagctcaaagaggcgcagagtgtgagttgcccgtttttcatgcggaaaaacagcgcaattatcaaagaaacagactgggtattactctccagaaatatttccatctaccggtaaggactgcaacccgcagcccgctaactgcctgaaagatcaatacgtcttacgccattgctgcgtggatgatcggtcgggcaaaatgggttattccgtaaaatttcttgttttaacaaggatggacacggaaacggcctcattattccactgcaagccttgttatagcaagatgacttttaccatttatcacccgcttactcacagttttttcacttcttgctggtgattggtttaataaccatcaataaagtgatcacgcagtgaagtaataaggtgcaaaagtaaatataagcatagaaaaatgagtggcgcgaatcctgttggctaattagaatcgccaaccatgaaaacagagactccatccgtaaaaattgttgctatcaccgctgacgaagcggggcaacgtatcgataactttttgcgtacccaattgaaaggcgtaccaaaaagtatgatttaccgtattttgcgtaaaggcgaagtgcgggtgaacaaaaaacgtattaagcctgaatataaactcgaagcgggtgatgaggtgcgtattccaccggttcgcgttgctgagcgggaagaagaggcggttagcccacatctgcaaaaggtggcggcgctggcggacgtcatcttatatgaagatgatcacatcctggtgctgaataaaccttccggtacggcggtacatggcggcagtggtttaagcttcggcgttattgaaggtttgcgggcgttgcgcccggaagcgcggttccttgaactggttcatcgtcttgaccgggacaccagtggtgttttgctggtagcgaaaaaacgcagcgcgttgcgttctctgcatgagcaattacgtgaaaaagggatgcaaaaagattacctggcgctggtgcgcggtcagtggcagagccatgtgaagagcgttcaagcaccgttactgaaaaatattctgcaaagcggcgaacgtatcgtgcgtgtgagtcaggaaggcaaaccgagcgaaacacgctttaaagtggaagaacgctatgcatttgccaccctggtgcgttgtagcccggtaacagggcgtactcaccagatccgtgtgcatacacaatatgcgggtcatccgattgcctttgacgatcgctacggtgaccgtgaatttgacaggcagctcactgaagcaggcacgggattaaatcgcctgttcctgcacgctgcagcgttgaagtttactcatccggggaccggtgaggtgatgcgtatcgaagctccgatggatgaaggtttgaagcgttgtttgcaaaagctgcgtaacgcgcgctaatacaagcatataaacctgataatgggcggttggcctgataaggcgtttacgccgcatcaggccgccagcaccgattgccggatgcgacgtaaccacatccggcgcaaaaaattatcccatcagcgggtttttcccttcccgacgtaacatctgacacagcgcgattagcggtaaaccaaccagcgtgttaggatcacgcccctctaaacgctcaaacagcgtaatgccaaatccttcactcttaaagctacccgcgcagtgcaggggatgctctttacgcacgtaattatcaatctccgcctcgctcaggtgacggaaatggacgtcaaaaggctccacttctgtttgcagatgcccattcgcgctattaaacaacgccagtccagtatagaaggtgacgatattgccgctggctttgcgtaattgcagacgggcattttcttccgttaacggtttaccggtgatttcgccatcaagaacacatacctggtcactaccaataattaaatgatccggataacgactcgccagagattgcgctttttcttgtgccagtcgaagcaccaactgtcgcggactttcgtcgctgcgtggggtttcgtcgacctctggtgctgcacattcaaaagagatttgcagtttttccagaagagcgcgacgccatgggctggtggaggctaaaataagtttaggcatatttttttccatcagatatagcgtattgatgatagccattttaaactatgcgcttcgttttgcaggttgatgtttgttatcagcactgaacgaaaataaagcagtaacccgcaatgtgtgcgaattattggcaaaaggcaaccacaggctgcctttttctttgactctatgacgttacaaagttaatatgcgcgccctatgcaaaaggtaaaattacccctgactctcgatccggttcgtacggctcaaaaacgccttgattaccagggtatctatacccctgatcaggttgagcgcgtcgccgaatccgtagtcagtgtggacagtgatgtggaatgctccatgagcttcgctatcgataaccaacgtctcgcagtgttaaacggcgatgcgaaggtgacggtaacgctcgagtgtcagcgttgcgggaagccgtttactcatcaggtctacacaacgtattgttttagtcctgtgcgtagtgacgaacaggctgaagcactgccggaagcgtatgaaccgattgaggttaacgaattcggtgaaatcgatctgcttgcaatggttgaagatgaaatcatcctcgccttgccggtagttccggtgcatgattctgaacactgtgaagtgtccgaagcggacatggtctttggtgaactgcctgaagaagcgcaaaagccaaacccatttgccgtattagccagcttaaagcgtaagtaattggtgctccccgttggatcggggataaaccgtaattgaggagtaaggtccatggccgtacaacagaataaaccaacccgttccaaacgtggcatgcgtcgttcccatgacgcgctgaccgcagtcaccagcctgtctgtagacaaaacttctggtgaaaaacacctgcgtcaccacatcactgccgacggttactaccgcggccgcaaggtcatcgctaagtaatcacgcatctgcgtgatgaagcttagtgaggattttccccaggcaactggggaaagaccaaaccgggcggcgacgataccttgacacgtctaaccctggcgttagatgtcatgggaggggattttggcccttccgtgacagtgcctgcagcattgcaggcactgaattctaatagccaactcactcttcttttagtcggcaattccgacgccatcacgccattacttgctaaagctgactttgaacaacgtagccgtctgcagattattcctgcgcagagtgttatcgccagtgatgcccggcctagccaagctatccgcgccagtcgtgggagtagtatgcgcgtggccctggagctggtgaaagaaggtcgagcgcaagcctgtgtcagtgccggtaataccggggcgctgatggggctggcaaaattattactcaagcccctggaggggattgagcgtccggcgctggtgacggtattaccacatcagcaaaagggcaaaacggtggtccttgacttaggggccaacgtcgattgtgacagcacaatgctggtgcaatttgccattatgggcagtgttctggctgaagaggtggtggaaattcccaatcctcgcgtggcgttgctcaatattggtgaagaagaagtaaagggtctcgacagtattcgggatgccagtgcggtgcttaaaacaatcccttctatcaattatatcggctatcttgaagccaatgagttgttaactggcaagacagatgtgctggtttgtgacggctttacaggaaatgtcacattaaagacgatggaaggtgttgtcaggatgttcctttctctgctgaaatctcagggtgaagggaaaaaacggagctggtggctactgttattaaagcgttggctacaaaagagcctgacgaggcgattcagtcacctcaaccccgaccagtataacggcgcctgtctgttaggattgcgcggcacggtgataaaaagtcatggtgcagccaatcagcgagcttttgcggtcgcgattgaacaggcagtgcaggcggtgcagcgacaagttcctcagcgaattgccgctcgcctggaatctgtatacccagctggttttgagctgctggacggtggcaaaagcggaactctgcggtaacaggacgctgccagcgaactcgcagtttgcaagtgacggtatataaccgaaaagtgactgagcgtacatgtatacgaagattattggtactggcagctatctgcccgaacaagtgcggacaaacgccgatttggaaaaaatggtggacacctctgacgagtggattgtcactcgtaccggtatccgcgaacgccacattgccgcgccaaacgaaaccgttagtaccatgggctttgaagcggcgacacgcgcaattgagatggcgggcattgagaaagaccagattggcctgatcgttgtggcaacgacttctgctacgcacgctttcccgagcgcagcttgtcagattcaaagcatgttgggcattaaaggttgcccggcatttgacgttgcagcagcctgcgcaggtttcacctatgcattaagcgtagccgatcaatacgtgaaatctggggcggtgaagtatgctctggtcgtcggttccgatgtactggcgcgcacctgcgatccaaccgatcgtgggactattattatttttggcgatggcgcgggcgctgcggtgctggctgcctctgaagagccgggaatcatttccacccatctgcatgccgacggtagttatggtgaattgctgacgctgccaaacgccgaccgcgtgaatccagagaatagtattcatctgacgatggcgggcaacgaagtcttcaaggttgcggtaacggaactggcgcacatcgttgatgagacgctggcggcgaataatcttgaccgttctcaactggactggctggttccgcatcaggctaacctgcgtattatcagtgcaacggcgaaaaaactcggtatgtctatggataatgtcgtggtgacgctggatcgccacggtaatacctctgcggcctctgtcccgtgcgcgctggatgaagctgtacgcgacgggcgcattaagccggggcagttggttctgcttgaagcctttggcggtggattcacctggggctccgcgctggttcgtttctaagataaggattaaaacatgacgcaatttgcatttgtgttccctggacagggttctcaaaccgttggaatgctggctgatatggcggcgagctatccaattgtcgaagaaacgtttgctgaagcttctgcggcgctgggctacgacctgtgggcgctgacccagcaggggccagctgaagaactgaataaaacctggcaaactcagcctgcgctgttgactgcatctgttgcgctgtatcgcgtatggcagcagcagggcggtaaagcaccggcaatgatggccggtcacagcctgggggaatactccgcgctggtttgcgctggtgtgattgatttcgctgatgcggtgcgtctggttgagatgcgcggcaagttcatgcaagaagccgtaccggaaggcacgggcgctatggcggcaatcatcggtctggatgatgcgtctattgcgaaagcgtgtgaagaagctgcagaaggtcaggtcgtttctccggtaaactttaactctccgggacaggtggttattgccggtcataaagaagcggttgagcgtgctggcgctgcctgtaaagcggcgggcgcaaaacgcgcgctgccgttaccagtgagcgtaccgtctcactgtgcgctgatgaaaccagcagccgacaaactggcagtagaattagcgaaaatcacctttaacgcaccaacagttcctgttgtgaataacgttgatgtgaaatgcgaaaccaatggtgatgccatccgtgacgcactggtacgtcagttgtataacccggttcagtggacgaagtctgttgagtacatggcagcgcaaggcgtagaacatctctatgaagtcggcccgggcaaagtgcttactggcctgacgaaacgcattgtcgacaccctgaccgccagcgcgctgaacgaacctagtgcgatggcagcggcgctcgagctttaaaagaggaaaatcatgaattttgaaggaaaaatcgcactggtaaccggtgcaagccgcggaattggccgcgcaattgctgaaacgctcgcagcccgtggcgcgaaagttattggcactgcgaccagtgaaaatggcgctcaggcgatcagtgattatttaggtgccaacggcaaaggtctgatgttgaatgtgaccgacccggcatctatcgaatctgttctggaaaaaattcgcgcagaatttggtgaagtggatatcctggtcaataatgccggtatcactcgtgataacctgttaatgcgaatgaaagatgaagagtggaacgatattatcgaaaccaaccttagttctgttttccgtctgagtaaagcggtaatgcgcgctatgatgaaaaagcgtcatggtcgtattatcactatcggttctgtggttggtaccatgggaaatggcggtcaggccaactacgctgcggcgaaagcgggcttgatcggcttcagtaaaagtctggcgcgcgaagttgcgagtcgcggtattactgtaaacgttgttgctccgggctttattgaaacggacatgacacgtgcgctgagcgatgaccagcgtgcgggtatcctggcgcaggttcctgcgggtcgcctcggcggcgcacaggaaatcgccaacgcggttgcattcctggcatccgacgaagcagcttacatcacgggtgaaactttgcatgtgaacggcgggatgtacatggtctgaccgcgatttgcacaaaatgctcatgttgcgcgcagtctgcgtggttatgagtaataattagtgcaaaatgatttgcgttattggggggtaaggcctcaaaataacgtaaaatcgtggtaagacctgccgggatttagttgcaaatttttcaacattttatacactacgaaaaccatcgcgaaagcgagttttgataggaaatttaagagtatgagcactatcgaagaacgcgttaagaaaattatcggcgaacagctgggcgttaagcaggaagaagttaccaacaatgcttctttcgttgaagacctgggcgcggattctcttgacaccgttgagctggtaatggctctggaagaagagtttgatactgagattccggacgaagaagctgagaaaatcaccaccgttcaggctgccattgattacatcaacggccaccaggcgtaagtgaacatctccaggcggtcgttcgaccgcctgagttttatctttttgtcccactagaatcattttttccctccctggaggacaaacgtgtctaagcgtcgtgtagttgtgaccggactgggcatgttgtctcctgtcggcaataccgtagagtctacctggaaagctctgcttgccggtcagagtggcatcagcctaatcgaccatttcgatactagcgcctatgcaacgaaatttgctggcttagtaaaggattttaactgtgaggacattatcagccgcaaagaacagcgcaagatggatgccttcattcaatatggaattgtcgctggcgttcaggccatgcaggattctggccttgaaataacggaagagaacgcaacccgcattggtgccgcaattggctccgggattggcggcctcggactgatcgaagaaaaccacacatctctgatgaacggtggtccacgtaagatcagtccattcttcgttccgagtacgattgtgaacatggtggcaggtcatctgactatcatgtatggcctgcgtggcccgagcatctctatcgcgactgcctgtacttccggcgtgcacaacattggccatgctgcgcgtattatcgcgtatggcgatgctgacgtgatggttgcaggtggcgcagagaaagccagtacgccgctgggcgttggtggttttggcgcggcacgtgcattatctacccgcaatgataacccgcaagcggcgagccgcccgtgggataaagagcgtgatggtttcgtactgggcgatggtgccggtatgctggtacttgaagagtacgaacacgcgaaaaaacgcggtgcgaaaatttacgctgaactcgtcggctttggtatgagcagcgatgcttatcatatgacgagtccgccagaaaatggcgcaggcgcagctctggcgatggcaaatgctctgcgtgatgcaggcattgaagcgagtcagattggctacgttaacgcgcacggtacttctacgccggctggcgataaagctgaagcgcaggcggtgaaaaccatcttcggtgaagctgcaagccgtgtgttggtaagctccacgaaatctatgaccggtcacctgttaggtgcggcgggtgcagtagaatctatctactccatcctggcgctgcgcgatcaggctgttccgccaaccatcaacctggataacccggatgaaggttgcgatctggatttcgtaccgcacgaagcgcgtcaggttagcggaatggaatacactctgtgtaactccttcggcttcggtggcactaatggttctttgatctttaaaaagatctaagttgtcattttccacccttataaaaggtccgcttgcgggccttttttcttagcttttattccgacttgttccgtagtgaacatgctgccacactaacaattctctgataaggagccggtatgttcttaattaacggtcataagcaggaaagcctggcagtaagcgatcgggcaacgcagtttggtgatggttgttttaccaccgccagagttatcgacggtaaagtcagtttgttaagcgcgcatatccagcgactacaggatgcttgtcagcggttgatgatttcctgtgacttctggcctcagcttgaacaagagatgaaaacgctggcagcagaacagcaaaatggtgtgctgaaagtcgtgatcagtcgcggtagtggcgggcgagggtacagcacattgaacagcggaccggcaacgcggattctctccgttacggcttatcctgcacattacgaccgtttgcgtaacgaggggattacgttggcgctaagcccggtgcggctggggcgcaatcctcatcttgcaggtattaaacatctcaatcgtcttgagcaagtattgattcgctctcatcttgagcagacaaacgctgatgaggcgctggtccttgacagcgaagggtgggttacggaatgctgtgcggctaatttgttctggcggaagggcaacgtagtttatacgccgcgactggatcaggcaggtgttaacggcattatgcgacaattctgtatccgtttgctggcacaatcctcttatcagcttgtcgaagtgcaagcctctctggaagagagcttgcaggcagatgagatggttatttgtaatgcgttaatgccagtgatgcccgtatgtgcctgtggcgatgtctcctttagcagtgcaacgttatatgaatatttagccccactttgtgagcgcccgaattaatcatgaaaaaagtgttattgataatcttgttattgctggtggtactgggtatcgccgctggtgtgggcgtctggaaggttcgccatcttgccgacagcaaattgcttatcaaagaagagacgatatttaccctgaagccagggaccggacgtctggcgctcggtgaacagctttatgccgataagatcatcaatcgtccacgggtttttcaatggctgctgcgtatcgaaccggatctttctcactttaaagccgggacttaccgctttacaccgcagatgaccgtgcgcgagatgctgaaattgctggaaagcggtaaagaagcacagttccctctgcgactggtagaagggatgcgtctgagcgattacctcaagcaattgcgtgaggccccgtatatcaagcatacgctgagcgatgataagtacgccaccgtagcgcaggcacttgaactggaaaacccggagtggattgaaggttggttctggccagacacctggatgtataccgccaataccaccgatgtcgcgttactcaagcgagcgcacaagaaaatggtgaaagcggtcgatagcgcctgggaagggcgtgcggacggtctgccttataaagataaaaaccagttggtgacgatggcaagtattatcgaaaaagaaaccgccgttgccagtgaacgcgataaggttgccagtgtatttatcaaccgtttacgcattggtatgcgcctgcagaccgacccgaccgtgatttacgggatgggagagcgttataatggcaaactttctcgtgcagacctggaaacgccgacagcgtataacacctataccattaccggtctgccgccaggtgcgatagcgacgccgggggcggatagcctgaaggctgctgcgcatccggcaaaaacgccgtatctctattttgtggccgatggtaaaggtggtcacacgtttaataccaatcttgccagtcataacaagtctgtgcaggattatctgaaagtgcttaaggaaaaaaatgcgcagtaagtatatcgtcattgaggggctggaaggcgcaggcaaaactaccgcgcgtaatgtggtggttgagacgctcgagcaactgggtatccgcgacatggttttcactcgggaacctggcggtacgcaacttgccgaaaagttaagaagcctggtgctggatatcaaaagcgtaggcgatgaagtcattaccgataaagccgaagttctgatgttttatgccgcgcgcgttcaactggtagaaacggtcatcaaaccagctctggctaacggcacctgggtgattggcgatcgccacgatctctccactcaggcgtatcagggcggcggacgtggtattgaccaacatatgctggcaacactgcgtgatgctgttctcggggattttcgccccgacttaacgctctatctcgatgttaccccggaagttggcttaaaacgcgcgcgtgcgcgcggcgagctggatcgtattgagcaagaatctttcgatttctttaatcgcacccgcgcccgctatctggaactggcagcacaagataaaagcattcataccattgatgccacccagccgctggaggccgtgatggatgcaatccgcactaccgtgacccactgggtgaaggagttggacgcatgagatggtatccatggttacgacctgatttcgaaaaactggtagccagctatcaggccggaagaggtcaccatgcgctactcattcaggcgttaccgggcatgggcgatgatgctttaatctacgccctgagccgttatttactctgccaacaaccgcagggccacaaaagttgcggtcactgtcgtggatgtcagttgatgcaggctggcacgcatcccgattactacaccctggctcccgaaaaaggaaaaaatacgctgggcgttgatgcggtacgtgaggtcaccgaaaagctgaatgagcacgcacgcttaggtggtgcgaaagtcgtttgggtaaccgatgctgccttactaaccgacgccgcggctaacgcattgctgaaaacgcttgaagagccaccagcagaaacttggtttttcctggctacccgcgagcctgaacgtttactggcaacattacgtagtcgttgtcggttacattaccttgcgccgccgccggaacagtacgccgtgacctggcttagtcgcgaagtgacaatgagtcaggatgcattacttgccgcattgcgcttaagcgccggtagccctggcgcggcactggcgttgtttcagggagataactggcaggctcgtgaaacattgtgtcaggcgttggcatatagcgtgccaagcggcgactggtatagcctgctagcggcccttaatcatgaacaagctccggcgcgtttacactggctggcaacgttgctgatggatgcgctaaaacgccatcatggtgctgcgcaggtgaccaatgttgatgtgccgggcctggtcgccgaactggcaaaccatctttctcccagccgcctgcaggctatactgggggatgtttgccacattcgtgaacagttaatgtctgttacaggcatcaaccgcgagcttctcatcaccgatcttttactgcgtattgagcattacctgcaaccgggcgttgtgctaccggttcctcatctttaagagagacatcatgtttttagtcgacagtcactgccatctcgatggtctggattatgaatctttgcataaggacgtggatgacgttctggcgaaagccgccgcacgcgatgtgaaattttgtctggcagtcgccacaacattaccgggttatttacatatgcgggatctggtaggcgaacgtgacaacgtcgtattttcttgtggcgtgcatccactcaaccagaatgatccctacgatgtagaagatttacgccgtctggcggcagaagagggtgttgtagcgctgggtgaaaccgggctggattattattacacgccggaaactaaagtacgtcagcaagagtccttcatccatcatatccagattggtcgtgaactgaacaagccggttatcgtccatacccgtgacgcccgtgccgatacgctggcaattctgcgcgaagaaaaagtgacggattgcggtggcgtactacactgttttacagaggacagagaaacggcgggtaaattactggatctcggattttacatctccttttccggcattgtgaccttccgtaatgcggagcaactgcgcgatgctgcgcgttatgtccccctggatcggttactggtggaaactgacagtccttaccttgcgccggtaccgcatcgaggaaaagagaatcaacctgcgatggttcgtgacgttgcagaatacatggctgtgttgaaaggtgttgccgttgaagaactggcgcaggtaaccaccgataacttcgcccgtctgtttcacatcgacgcttcccgccttcaatccatccgttgaatgagtttttttaaagctcgtaattaatggctaaaacgagtaaagttcaccgccgaaaattgggcggtgaataaccacgtttgaaatattgtgacatatgttttgtcaaaatgtgcaacttctccaatgatctgaagttgaaacgtgatagccgtcaaacaaattggcactgaattattttactctgtgtaataaataaagggcgcttagatgccctgtacacggcgaggctctccccccttgccacgcgtgagaacgtaaaaaaagcacccatactcaggagcactctcaattatgtttaagaatgcatttgctaacctgcaaaaggtcggtaaaagcctgatgctgccggtatccgtactgcctatcgcaggtattctgctgggcgtcggttccgcgaatttcagctggctgcccgccgttgtaagccatgttatggcagaagcaggcggttccgtctttgcaaacatgccactgatttttgcgatcggtgtcgccctcggctttaccaataacgatggcgtatccgcgctggccgcagttgttgcctatggcatcatggttaaaaccatggccgtggttgcgccactggtactgcatttacctgctgaagaaatcgcctctaaacacctggcggatactggcgtactcggagggattatctccggtgcgatcgcagcgtacatgtttaaccgtttctaccgtattaagctgcctgagtatcttggcttctttgccggtaaacgctttgtgccgatcatttctggcctggctgccatctttactggcgttgtgctgtccttcatttggccgccgattggttctgcaatccagaccttctctcagtgggctgcttaccagaacccggtagttgcgtttggcatttacggtttcatcgaacgttgcctggtaccgtttggtctgcaccacatctggaacgtacctttccagatgcagattggtgaatacaccaacgcagcaggtcaggttttccacggcgacattccgcgttatatggcgggtgacccgactgcgggtaaactgtctggtggcttcctgttcaaaatgtacggtctgccagctgccgcaattgctatctggcactctgctaaaccagaaaaccgcgcgaaagtgggcggtattatgatctccgcggcgctgaccagcttcctgaccggtatcaccgagccgatcgagttctccttcatgttcgttgcgccgatcctgtacatcatccacgcgattctggcaggcctggcattcccaatctgtattcttctggggatgcgtgacggtacgagcttcagccacggtctgatcgacttcatcgttctgtctggtaacagcagcaaactgtggctgttcccgatcgtcggtatcggttatgcgattgtttactacaccatcttccgcgtgctgattaaagcactggatctgaaaacgccgggtcgtgaagacgcgactgaagatgcaaaagcgacaggtaccagcgaaatggcaccggctctggttgctgcatttggtggtaaagaaaacattactaacctcgacgcatgtattacccgtctgcgcgtcagcgttgctgatgtgtctaaagtggatcaggccggcctgaagaaactgggcgcagcgggcgtagtggttgctggttctggtgttcaggcgattttcggtactaaatccgataacctgaaaaccgagatggatgagtacatccgtaaccactaatccgtaagacgttggggagactaaggcagccagatggctgccttttttacaggtgttattcagaattgatacgtgccggtaatgctgaaattacgcggtgtgccgtagacgatagaaccttccacgttggtatcgtaggttttgtcgaacaggttattgacgttcccctgtaagctgaagtttttcgtcacctggtagcgggtgaagagatccaccagcgcgtagctaccttgctcggcgcggaaggtgccatacggcgtcacggtgtcggtatacacgcgattttgccagttaacaccaccgccgaccgtcaactctggcatgacaggcaaccgatagctggtgaacattttaaccgtggtgcgtggcagattaggattaacggcgtttccttcgttatcctctgcaatatagcgcgttgcgccaaatgtcagctgccagttgtcggtaattgcgccgttgagttcaaattccacccctttactgactgtcccatccaccgctttataggcggtttcgccgttgctgccggggataggtgtaccggtggactgagcgacattatcctgctcaatacggaagatggctaacgtggtggtcagacggctattcatccagtcgcttttcagacccagctcgtagttgttaccggtgattggagccagatatttgccactactgtcacgatcattttgcggctggaaaatagaggtatagctggcgtaggtgctccagttgtcattgatgtcaaacaccagaccagcgtaaggcgtggtgtggtttttctccatgctgtaagtcagcgtatcaacccgccagttggtataacgtgcgccgaggatcagatgcagcggatcggcaagggtgacacgagtggcagcatataagcttttcatatgtgtggtatcgtcctgcgccaggctctgtggactccagtcggtttgtgggaaattgccattaaagttgtagaaactgccaatttcatccgggaagatgttggcccaactactgaagtaacgattgttttgtttgctgtaactgccaccaaacattagattgtgctgacgaccaaacaattcataactaccgtcagcgaacaaatccagcgcatcaactttacgtttgccactgttccaaccggtgccgccgacataatcaaagccaggtccataattactgtatggcccaaccagcataccatccgctttgtttacataggcatcgacatacatcattttgctgtcaaattcgacttcagagtgggtggcattcagtgtcgcttgccaggtatcagcaaactgctgcttcagggtcataaagaccttgttgatctctttatcgttgtacgcccagtcaggtgcggtactgcgtgcgcgatcgtaactgttgctgctgccatcagtattccagcgcggtaaaccgccccaggtagggctattaacatcaatgcgctgatattcgtaaccggcactaagcgtcgtaagatcgcctaaatcagcatcgacaatgccgctgaagaaggtcttttcactgttgtagcggtccagccaactgtcgttattctggtagccgccgacaattcgcgcgcggattttaccgtcttcggtgagtgggctttgtaaatccgccacataccgttctttgttccagctaccgtattccgcgctgacatcgcctttaaattcacgactggtcgcgtgttttcgaaccatattaattgccgcagatggattacccgtcccggtcatgagtcctgtcgcgccacgcactacttctacgcgttcaaagagtgccatatcagaaagtgcgtcgcccagattccagcggctttcaaaataggtggggataccatcaaccatatagttatcgatctggaatccgcgggaataataaagagcacgatcggaatccgcctgacttttgctgatccccagcgtgttttccatcacttcgcccagcgtttgtaactgctgatcttccatccgctgctggctaacaatagtgacgctctgaggaatatcacgttgagtcatctgcattttggtacccgcagaggtagacgttacgctgtaatcattttcgccatcatctggagctgtggcactaccctcaacaatcaccgtttcttcagtggctggtgcagcaaaagcggcagaaggtaatagtgccagtgctatgcaaccggcaagtagactcggtttggtgatggcttgatattgattatccctgttaaattgtgtactaagcatttgaaatctcttggtttatgttgtcgtcaggctcatgccggaggagggtgatgagcgattatatttagtgtgcgaataattttgtttgtaaatgcaaatgagaaatatacgcattcatatttgtcatgtaaaccaaacagagaatgtcttttcagcgcattcgcaggcagaaatgggaataatggcgatatatacggcagcaaaacgattttttgcttaagaaatcgtgagttaaggttgaaagagcaggtttaactcgaccatactctatactcgcagtgtggcgcggcgtagcatggcgcaacgcatggctatttgaaaaaggaaaatgtcgtggcagaagaaactatattcagcaaaattattcgtcgtgagatcccctccgatatcgtctaccaggatgatctggtaacggcgtttcgcgatattagcccgcaagcgccaacgcatattctgatcattccgaatatcctcattccgactgtgaacgacgtcagtgctgagcatgagcaggcgctgggacgcatgatcaccgtagcggcaaaaattgctgagcaagaaggtattgccgaagatggctatcgtctgatcatgaataccaaccgccatggcggacaagaggtttaccacatccatatgcacttgttgggtggccgtccgctgggaccaatgctggcgcataaaggtctgtaacgatgagaaaaggatgctttgggctggtgtctctggtgttgttactgctggtgggctgtcgtagtcatccggaaattccggtgaatgatgagcaaagcctggtgatggagagttctttattggctgcgggcatcagtgcagaaaagcccttccttagcacgtctgatattcaacctagtgcatccagtacgctttataacgaaaggcaagaacccgttaccgttcattatcgtttttactggtatgacgccagagggctggagatgcatcctctggaaaggccacgcagcgttaccattcccgcacatagcgcggtaacgctgtacggcagcgccaattttctgggggcgcacaaagtcagactttatctatatttgtaaggggtgaatcttgatgacaaaaatgagtcgctacgccttgattaccgcgctggcgatgtttctcgccgggtgtgtggggcaacgtgaacctgcaccggtagaagaagtgaaaccagcgccggaacaaccagccgagccacaacagcctgtccccacagtgcccagcgtgccgacgatcccgcagcagccaggcccaattgagcacgaagatcaaactgcaccgcctgcgccgcatattcgccattatgactggaatggcacaatgcagccgatggtcagtaagatgcttggggctgacggggtgactgcgggtagcgtcctgctggttgatagcgttaacaaccgtactaacggtagcctgaatgccgcagaagcgaccgaaacgctgcgaaatgcgctggctaataacgggaaatttaccctggtttccgcccagcaactgagcatggcgaagcaacagttaggtttgagcccgcaggacagtttaggcacccgtagtaaagccataggcattgcccgcaatgtcggcgctcattacgtgctgtactccagcgcctctggcaacgttaacgctccgaccctacaaatgcagctgatgctggtgcagacgggcgaaattatctggagtggtaaaggtgccgttagccagcaataagtaaaattatctggtcaggtaaaggtgccgtttcgcagcaataatcccatcacgcgcgacgaattgctgagccgctttttcccgcagtatcatcccgtcacgacgtttaatagtgggcttagtggcgggagttttctcattgaacatcagggccagcgttttgttgtgcgtcagccgcacgatcctgatgcgccgcagtccgcgttcttgcgccagtatcgggctttaagtcaactacccgcatgcattgcaccgaagccgcatttatatctccgtgactggatggtagtcgactatctgcccggcgcggtaaaaacgtatttgccggataccaacgaactggcaggcttgctgtattatctacatcaacaaccacgttttggctggcgaataacgctgttgccgttactggaactgtactggcagcaaagcgatccggcgcggcggacagtgggttggctgcgaatgttaaaacgtctgcgcaaagcgcgggaaccacggcctttacgcttaagtccattgcatatggatgtccacgccggaaatttagtgcatagcgcgagtgggttaaaactcatcgactgggagtatgccggagatggtgatatcgcgctggaactggcggcggtgtgggtggaaaatactgaacagcaccggcaattggtcaatgactatgccactcgcgcgaagatttatccggcgcaattatggcgtcaggtcaggcgatggtttccctggctgctgatgctcaaagcagggtggtttgagtaccgctggcgacaaaccggcgatcaacaatttatcaggctggccgatgacacctggcggcagctattaataaaacaataaggagagcagtgtgggtccagtaatgttggatgtcgaaggttacgaactggacgcggaagagcgtgaaatactggcgcatccgctggtgggagggctgattctctttacgcgtaactatcatgatcctgcccagttacgtgaactggtgcgccagatccgcgcagctagccgcaatcgtctggtggtggcggttgatcaggaaggtggacgcgtgcagcgttttcgtgaaggttttacccgcttgccagcggcgcaaagtttcgctgcgctgagtggaatggaagagggtggcaaactggcgcaggaggcaggttggttgatggccagcgaaatgatcgctatggatattgatatcagctttgcgcctgtgctggatgtcgggcatatcagcgcggcgattggcgagcgttcttatcatgccgatccacaaaaagccctggcaattgccagccggtttattgatggtatgcatgaagccggaatgaaaacgaccgggaaacacttcccaggacacggtgcagtaacggcagacagtcacaaagaaacaccgtgcgatccacgtccacaagcggagattcgcgctaaagatatgagcgtcttcagttccttaatccgcgaaaataaactcgacgccattatgcctgcgcatgtgatctacagtgatgttgatccgcgtccggcgagcggttctccctactggctgaaaaccgttttgcgtcaggaactgggttttgacggcgtgattttctctgacgatttaagcatggaaggtgccgcgattatgggcagttatgccgaacgcgggcaggctagtctggatgcgggttgcgatatgatcctggtctgcaataatcgtaaaggggccgtcagcgtgttagataatctgagtccgatcaaggcagaacgtgttacacgtttgtatcataaaggtagttttagccgacaggaactgatggacagcgctcgctggaaagcgatcagcacccgtctgaatcagttacatgaacgctggcaggaagagaaagcaggtcactaaccctggcttatgtgaggaagcgatgattatctatttacacggttttgactctaacagtccgggtaaccacgagaaagtcttacaattgcagtttattgacccggatgtacgcttgataagctacagtacgcggcatccgaaacatgatatgcagcatctgcttaaagaagtggacaaaatgttgcaactgaacgttgacgagcgtccgctaatttgcggcgttggcttgggcggatactgggcggaacggattggttttctttgcgacatccgccaggtgatcttcaaccctaatttgttcccttatgagaacatggaaggcaagattgatcgcccggaagagtatgccgatattgccactaagtgtgtgaccaacttccgtgagaagaatcgcgatcgttgcctggtgattttgagccgtaatgatgaagcgcttaacagccagcggacatctgaagagttgcatcattattacgagattgtctgggacgaagagcagacgcacaaattcaagaatatctccccgcatttacagcgcattaaagcgttcaaaaccctcgggtaaatgccctcgtcgcatcaggtaaccttgccggtacctgatgcgctccgaattctgtgggtcggataaggcgtccacgccgcatccgacagtcgagcatcaatgcctgatgcgcttcttatcaggcctaccgaacgccctgcatacacccctcactctatatcactctcacaaattcgctcaaataataaacaataaactctgttttttgatctcacccggtaaagtcgcctatcttttcagcaacaaaacttgattaacatcaattttggtatgaccaatgcaccattcatgttattctcaatagcgaagaacattttcattgctgtaacctgttgttaattaagagctatgttaataaccattaattaacaattggttaataaatttaagggggtcacgttgactacgccattgaaaaagattgtgattgtcggcggcggtgctggtgggctggaaatggcaacacagctggggcataagctgggacgcaagaaaaaagccaaaattacgctggtcgatcgtaaccacagccacctgtggaaaccgctgctgcacgaagtggcgactggcagccttgatgaaggcgtcgatgcgttgagctatctggcccatgcgcgcaatcatggtttccagttccagctgggttccgtcattgatattgatcgtgaagcgaaaacaatcactattgcagaactgcgcgacgagaaaggtgaactgctggttccggaacgtaaaatcgcctatgacaccctggtaatggcgctgggtagcacctctaacgatttcaatacgccaggtgtcaaagagaactgcattttcctcgataacccgcaccaggcgcgtcgcttccaccaggagatgctgaatttgttcctgaaatactccgccaacctgggcgcgaatggcaaagtgaacattgcgattgtcggcggcggcgcgacgggtgtagaactctccgctgaattgcacaacgcggtcaagcaactgcacagctacggttacaaaggcctgaccaacgaagccctgaacgtaacgctggtagaagcgggagaacgtattttgcctgcgttaccgccacgtatctctgctgcggcccacaacgagctaacgaaacttggcgttcgcgtgctgacgcaaaccatggtcaccagtgctgatgaaggcggcctgcacactaaagatggcgaatatattgaggctgatctgatggtatgggcagccgggatcaaagcgccagacttcctgaaagatatcggtggtcttgaaactaaccgtatcaaccagctggtggtggaaccgacgctgcaaaccacccgcgatccagacatttacgctattggcgactgcgcgagttgcccgcgtccggaagggggctttgttccgccgcgtgctcaggctgcacaccagatggcgacttgcgcaatgaacaacattctggcgcagatgaacggtaagccgctgaaaaattatcagtataaagatcatggtagcctggtaagcctgagcaacttctccaccgtcggtagcctgatgggtaacctgacgcgcggcagtatgatgattgaaggacgaattgcgcgctttgtatatatcagcctataccgaatgcatcagattgcgctgcatggttactttaaaaccggattaatgatgctggtggggagtattaaccgcgttatccgtccgcgtttgaagttgcattaatcgacgtacactggcggatgtggcataaacgcctcatccgcccttgaggaacagcgcgatcggcagccgcgttgtatcaggcatcctttcagactcctccgaatccttaagtatttccagccattcccgcgcttttcatcttctgtctgatagctgcttttctccttcgcttgcatgattggcataactgcaaagaaggaggtgttcccgtgaataaaagtatgttggcgggtatcgggattggtgtcgcagctgcgctgggcgtagcggcagtggccagtctgaacgtgtttgaacggggcccgcaatacgctcaggttgtttctgcaaccccaatcaaggaaacggttaaaacaccgcgtcaggagtgtcgcaacgtcacagtgacccatcgtcgaccggtgcaggatgaaaatcgcattaccgggagcgtgctcggcgctgttgctggcggcgtgatagggcatcagtttggtggtggtcgcggtaaagatgtcgccactgttgtgggggcgctgggtggtggatatgccggtaaccagatccagggctctctccaggaaagcgatacttacacgactacgcaacagcgttgtaaaacggtgtatgacaagagtgaaaaaatgctcggttatgatgtgacctataagattggcgatcagcagggcaaaatccgcatggaccgcgatccgggtacgcagatcccgctagatagcaacgggcaactgattttgaataacaaagtataacaaggctgtactctgcaatttggcccctcattcgctcaggctgaggggctttttttgcgacttatttcaccagttcgggccataaacgcaaagtcgttccggcaatctgcatcagtttttccaggcttgcaccttcgcgtgcgctgatgctcatcccctgaataatacaattaaggaattctgccagatgtgtcacgtcacagtggggcgggatttccccgcgcgcttgtcgttgacataaaaactgctgcaaagtgcgctcttgcatcgcatggcgacttttcaacgtattggcgatatctccactatctggggagagggtggtgcagttgttgatcatgaagcagcctgccggggtgtctttgctggtaaagcagttggcgatggcagcaaaatagtcagccagcgcagactccacgcttttctcttcacaaaacagctgtgcttcatgcttagcggcaaaacgatcgatatagcggtcgagaacggcacgaaataacccctctttgttggtaaattccgcgtatagcgtgggcgctttggctccggtcgcttcgacgaggtccgcaagagaagtcgcttcataaccgtgttgccagaacaatttcatggccttatcaagcgcggcatccctgtcgaacacttttgggcggccacggcttttttttacacattgtgtactgtcagttgccatgatgccgttgtacctggtgactgtgaatgaaaggttattataaaaataatcacctccgttcaccagtccagatcccataaaaataattgctttctatttaactgaaatttaaagatttttaaattaattaatgattgttataaaaaatatcttgtatgtgatccagatcacatctatcatttagttatcgatcgttaagtaattgcttgcgacgtcattcatctgcataaggccactattatgaaaaacgtaaaaaccctcatcgctgcggcgattttaagctccatgagttttgccagctttgcggctgtcgaagttcagagtacgccagaaggccaacaaaaagtcggtacaatcagtgctaacgcggggacaaatctgggaagcctggaagagcagctggcgcaaaaagcggatgagatgggcgcaaaatctttccgtattacttctgtaaccggtccgaataccctccatggaacagcagtaatttataaataagcattaaccctcattaatgcctgctactgctgattttttccccgcgacatgccgtgtcgcggggatttttttatccgggctttacagcgtttgtgggctcacttgatgacggcggacatccaccggcatcccggaacggacatccatcacatgttgcatcacttcagcgtcagtttgtgctgcatctttaaaactttgcattgcgctattcagcgtaattggcagcagctgcggatcgtcatcaatcttctcactcagcggctgatgtacttcaaccagacgcgcaccgtttggttcggcagagacttttatcggagtgttgatgatattcactttggtgcctggggtgacctggctaaagagtgttttgatatcgtcatcccgcagacgaatacagccagaacttacccgcatgccaatgccgaaatcggcgttcgtaccatgaagcaaataaacgccgccataggccgccagacgaatcgcatgatggcccattgggttatccagtccagccggcactaccgcaggcaactcaattccctgtgctttataacgggcgcggatgtttgccgttggcgtccaggttgggtttgcacgtttgtcactaacggtggtcaccattgtcggtgtcagcgtgtcaccacctaactgaccaatacctattggatacacggttacgctatttttacccggcgggtagtaatagagacgcagctccgcaatgttgatcacaatgccttcgcgcggcgcatctggaagtagggtttgcaacgggatcgttaacacgctgcccgcgcgcggtacgtaaggatcaacgccggggttagcctgtaacagagcgagaaagccgacgttgtattttttggcgatggcttccagagaaccaccgtcattttccaccacatgaaatttgttttcgccaaccagacgactgcccgctggcggcagcggccaggtgttggcttttgccggtagcgccagcgccacggcagcggcgaacgtaaaaaacgttagccagcgagaaaaacgcgttttgatcatcaccaaaaatccataataaatataaggttattgtaataaacagataagcctgaattatggatggtgacagtgtcggatagtgcagggaagtgcaaagaatttgtaaatgttgcagatgggggcgcagaaacgcccccgatttaccattaagcgatcgcgttctcttccagttcacgcataaactggcgtacccattcgatacgcgttttccgctcactcaaatcctgaataaatttcaggcgcgtcggaccatcaaggcggtaatgctgcggctgtttttgcagcaaaccaatcaaccaggccggattaacgtgattcttctcggcaaattcgatcaccccgcctttctcattaccttccagcttcctgatccccagtttctgcgcttgctggcgcagacgggcaatatccagcagggtacgcgccggatctggcagcaggccgaagcgatcgataagctcgactttgatctcttccagttcgttttccgttttggcgctggcaatacgtttgtagaagctcagacgcgtgttcacgtcagggatgaaatcatctggcaataggctcggcatccgcagctcgacttctgtttgctggctggtgagatcttccaggctcggctcgcgtccggctttcagtgcatcgacggcgttttccagcaactccatatacaggctgaaaccgatggtttccatactgccgctttgttcttcgccaagcagttcacccgcgccgcgaatctccagatcgtgcgttgccagcgcaaaacctgccccgagatcttccaggctggcaattgcttcaagacgtttttgtgcatcggtagtcatcgcttttggatgcggtgtcagcaaccatgcatatgcctgatgatggctacgtccgacgcgaccgcgtaactggtgcagctgcgccagaccgaagtgatccgcgcgttcaatgataatagtgttggctgtcgggatgtcgatcccggtttcgataatggttgtacaaaccagcacgttgaaacgttgatgatggaaatcattcatcacccgttccagttcgcgctcgcgcatctgcccgtgaccgatggcgatccgcgcttctggcaccagttctgccagccgttcggcggctttctgaatgttttccacatcattgtagagataataaacctgtcctccgcgcaaaatttcacgcaggatcgcctcccggaccaccatgctgtcatactcacggacaaaggttttaactgccagacgacgggcgggcggcgtggcgataatgctcaggtcacgcattccgctcattgccatattcagcgtacgtgggatcggcgttgcagtaagcgtcagaatatccacgttcgcgcgcatcgctttaatgcgctctttatgacgcaccccgaagcggtgttcttcatcgacaatcagcaggcctaaatctttaaacttgacgtcactttgcagcagtttgtgcgtaccgatcagaatatcgattttcccttccgccacttccgcaaggatttgcgtctgctctttggcgctgcggaaacgggagatcatttcgatacgtaccggccagttggcgaaacggtcgcggaagttgtcgtaatgctgctgcgcgagaagggtggtaggcaccagcaccgccacctgcttgtggttatctactgccaggaaagctgcgcgcatcgccacttctgttttaccaaagccaacatcgccgcacaccagacgatccattgccagcggctgacacatgtcgctaagtaccgcattaatggcctgcgcctgatccggcgtggtttcaaacgggaagctgtcgcagaacaactgatactgctcacgatcgtgtttaaacgcgaagccctctttggcggcgcgttgcgcgtagatatccagcaattccgccgccacatcacgcactttttccgccgctttctgccgcgcgcgactccacgcatcgccgccaagtttatgcagcggggcgttttcttccgcgccacctgcgtaacggctaatcagatgcagactgctcaccggaacatacagtttggcgtcgttggcataggtgagcatcagatactcgccagtaatgccacccgcttccagcgtggtcattccggcataacgaccgacgccgtgctccagatggaccaccggctgaccaatatgcagttccgcaaggttacggatcagtgtatcggggttgatggtgcggcgagaatcctgacgacgacgggcaacgcgttcaccgagcagatcgctttcgcaaatcagcgccagattacgcaccgtatcgacaaaaccatgttcggcagcgccaatcatcagataacgcccacggtcgctggcttcatcaagacgcataatgcgttgcggagcaattttaattcgtgcgagcagttcacccagcgcttcacggcgaccttcactttctacgctgaacaccaccggaccgtcgaaagtctcgaggaacttacgcagcgcatccagcggcgctttttgttgtgcctgaacggccaggtctggcagtttctggaaacctaaattggcattcgcggcttttgtcggtaaatgttcagtttttagctgcacccggggccagtttttcagctcactgaagagctcgtccacccgcagccagaggctttgtggtggcaacagcgggcgcatcggatcgacgccgcgattctcaaaacgcgccagcgtgtcagcctggaaacgttcggcactggtttccagatcgccagtattcacgagcaaggtattggcagggaaataactgaacagcggcggcagtggttcgctgaagaacaatggctgccagtactcgatcccggcaggtaatgtgcctttactcacttgctggtaaatatgttctggatcgcgcttcacttcgaaggtatcgcgccactggctgcggaacagttcaattgccgctttatcggtcggaaattcgtgcgcgggcagcagattgatcgcttctacttcctccagcgtgcgctggctgtcgacgtcaaacacccgcaggctgtcgatttcatcatcaaagaaatcaagacgataaggcagctcactccccatcgggaagagatccagcaacgcgccgcgcgtggcgtattcgccgtgctccatcacctggtcaacatggcgataaccggcgctgtccagttgggttcgtaatgcatctcgactcaggcgctgaccttttttcatcaccagcgcatgaccgtggagaaaactgtgtgggcaaacgcgctgcataagcgtattcaccggaacaatcagtacgccacgctgcatcgtcggtagctggtaaagggtggaaaggcggctggagataatgtcctgatgagggctaaaactgtcgtagggaagagtttcccagtccgccagattcatcaccatttgatcggtaaactggctgatttcatcatgcaaacgcagagcattttgcatatctggtgcaatgagtaccaccggaccggcgtgacgttcggcaatttccgctaccagcgttgcacaggctgcgccggttaactcgcccagcagacgctgctcacccgctttgacgggcagcgtataacgatattgttcaggcataacggttgtcagattctcgttaggatatgcctcaacatatgggggcatatctctgataagcaatgctgttcattatccgtaatcgacatggtttagcaaattgaatcgccccggctggggcgatggcttagcgggagtaactgacggcagcgggcagactaggcggggagaacaacagatcgctgaatgcacgctgactaagttttcttaccagcaagcccgcaacagtacagatgaacaaactgacaaagggataaaccagcaggagtgtcagttcgacttgcgggctccagcgtgctgcgttcatttgcgcaagcagagttaagctgaatatttcaaccagaatgcgatgggtggtgtagatagcaatggtgttggagccaatcacattcagcaggctggtggagcgcataccgaatcgttgctcgtattgataaaacagcttcatgatcaccacaatgcttaccaggctcaacagcaggctgatagtaaacaaccaggcaccgaccgccagaacggtaagcaaagaagccatcagcagatggcggcgcaacggcacctctttaacacaggtcattattgttgcgccaaaccatgcgccaaggctgtaataaggcaaattgcggatcacactgttcattccccaccacggcgtgggaacgaaattaaccgccacactcagcagtacaaacaaggcgaatagtggcagcgccagacggctaaaaattttacataccacgaaatagacaattaacgcatacagataccacaagctggtgctggcggtgatcatcccgtgcaggaactcaccggtggaatcggcataagcggcattggaggcattgcttaaatcgcgctcaggtgccagccactggttcagcgcacttaacgccagccactgcaccacgccccaaagcgccagcacccagaagatgttccagatccgtttatcgagacaatttccccacggtacgctgtcgatatagcggcgaatcaaatagccggatataaagaaaaaaaccggcatacgaaagggggcaaggtaaagattgaaatagatccagcatttgctcaggacttcgcttaacggatgctgaaaagtggtcagatgcggataaaaggtaatgacgctgtgataaatcaccaccagacaaatacataaccctttgatctggttaatccatagctctttttgtttcatcaggacaacacgctcttttttaatttacatgcggttgatcctgcgggttatgacccgaggtgtaatgggtatctgtctgtattggatgatttttcagattaagatcaggcggcaagattgatgataaaacatggcaatttagccgattgatttacgggggcttttcagattagccctgacgatcacttacagttcagacgtttacccatcttgctttcgcttatatactcgtgtctttgctacagcaaccagacggatttcatgtaccaacctgtcgctctatttattggcctgcgttacatgcgtgggcgtgcagcggatcgcttcggtcgtttcgtctcctggctttctaccatcggcattaccctcggggtgatggcgctggtcacagtattgagtgtgatgaacggctttgagcgcgagctgcaaaacaacatccttggcctgatgccacaggcaattctctcttctgagcatggctctcttaacccgcagcaactcccagaaacggcagtcaaactggacggcgttaatcgcgtcgcacctattactaccggtgatgtggtactgcaaagcgcgcgcagcgtggcggtcggggtgatgctcggtatcgacccggcgcaaaaagatccacttacaccgtatctggtcaatgtgaaacaaactgacctcgagccggggaaatataatgtcatcctcggcgaacaacttgccagtcagctaggcgttaatcgcggtgatcaaatccgcgtgatggtaccatctgccagccagttcacgccgatggggcgtattccaagccagcgcctgttcaatgtgattggcactttcgccgccaacagtgaagtcgatggctatgaaatgctggtgaatattgaggatgccagccgtctgatgcgttatccggcaggcaatattaccggctggcgtttgtggctggatgagccgctgaaagtcgacagtttaagtcagcaaaaactgcctgaaggcagcaaatggcaggactggcgtgatcgtaaaggcgagttgttccaggccgtacgcatggaaaaaaatatgatgggtttactgctgagcctgattgtcgccgttgcggcgtttaacattattaccagtctagggctgatggtaatggagaagcagggcgaagtagcgatcctgcaaacgcaaggcttaactccgcgacaaatcatgatggtctttatggtgcaaggggccagcgccgggattatcggtgcgatcctcggagcggcgcttggcgccctgcttgccagccagttaaataatctgatgccgataatcggcgtcctgcttgatggcgcggcgctgccggtggctatcgaacctttacaggtcattgttattgcgctggtggcgatggctatcgcgctgctgtctacgctttaccctagttggcgcgctgccgccactcaacccgctgaggctttacgttatgaataagatcctgttgcaatgcgacaacctgtgcaaacgctatcaggaaggcagtgtgcaaaccgatgtgctgcacaatgtcagtttcagcgtcggcgaaggtgaaatgatggcgatcgtcggtagctctggttccggtaaaagtaccttgctgcacctgctgggcgggctggatacgccaacctccggcgatgtgatttttaatggtcagccaatgagcaaactgagcagcgcagcgaaagctgaactgcgcaaccagaagctgggctttatttatcagtttcaccacctgctgccggattttaccgccctggaaaacgtggctatgccgctgctgattggcaagaaaaagcccgctgaaatcaacagccgtgcacttgagatgttaaaagcggtggggctggatcatcgtgcgaatcaccgcccatctgaactttctggcggcgaacgccagcgtgtggcgattgcccgtgcgctggtgaataacccgcgcctggtactggcggatgaacctaccggtaacctcgatgcgcgtaacgccgacagcatcttccagttgcttggggaattgaatcgcttgcagggcaccgccttcctggtggttactcacgacctgcaactggcgaaacgtatgagccgccagttagaaatgcgtgatggtcgtctgacggcggaactgagcctgatgggggcggagtaatggcgatgcctttaagcttattaattggcctgcgttttagtcgcggacggcggcgcggcggcatggtgagcctgatctccgttatttctaccattggcattgccctcggcgtggcggtattgatcgtcggcttaagcgcgatgaacggctttgaacgcgaactgaacaaccgtattctggcggtggtgccgcatggtgaaatcgaggcggtggatcagccgtggactaactggcaggaagcactggatcacgtgcaaaaagtgccgggtattgccgctgccgcgccgtatatcaatttcaccgggctggtggaaagtggcgcgaatcttcgcgcaatccaggtgaagggcgttaacccgcaacaggaacagcgtctgagcgcattacccagctttgtccagggcgatgcgtggcgcaattttaaagcgggcgaacagcaaattatcatcggcaaaggcgtggcggatgcgctgaaagtgaagcagggggattgggtgagcattatgatccccaacagcaatcccgagcataaactgatgcagccaaaacgtgtgcgtttgcacgttgccggtattttgcagttgagtggtcaactcgatcacagttttgccatgatcccgctggcggatgcccaacaatatcttgatatgggttccagcgtgagtggtattgcccttaaaatgacggatgttttcaacgccaataagctggtacgcgatgcgggtgaagtgaccaacagctatgtttatattaaaagctggattggtacttacggctatatgtatcgcgatatccaaatgatccgcgccattatgtatctggcgatggtactggtgattggcgtggcctgtttcaacatcgtctccaccttagtgatggcggtgaaagacaagagtggcgatatcgcagtattaagaacgctgggggcgaaagatggtttaattcgcgccatctttgtctggtatggattgctggcagggctgttcggcagcctgtgtggtgtgattatcggcgtagtggttagtctgcaacttaccccgattattgagtggattgaaaagttgatcggtcatcagttcctctccagcgatatctattttattgatttcctgccaagcgaattgcactggctggacgtcttctacgtactggtcacagcattgttgctgagtcttttggcaagttggtatccggcgcggcgcgccagtaatattgaccctgcgcgagtccttagcggccagtaaaggcagtacattaaaacaaggagcggcaatgtattacgggtttgatattggtggaacaaaaattgcgcttggcgtgtttgatagcggtcggcagttgcagtgggaaaagcgggtgccgacaccgcgtgacagctatgacgcatttttagatgcagtgtgtgagctggtagctgaagctgaccaacgttttggctgtaaaggttctgtcggcatcggtattccgggaatgccggaaacagaagatggtacgctgtatgccgccaatgtccccgctgccagcggtaaaccgctgcgtgccgacctgagcgcacgtcttgatcgcgatgtacgccttgataacgatgccaactgttttgcccttagtgaagcctgggatgatgaatttactcaatatccactggtgatggggttgattctcggcaccggtgttggcggcgggctgattttcaacggcaaaccgattaccggtaaaagctacattaccggcgagtttggccatatgcgtctgccggttgatgcgttaaccatgatggggttggatttcccgttacgccgctgcggctgtggtcagcatggctgcattgaaaattatctgtctggtcgcggttttgcgtggctgtatcaacactattatcatcaaccgttgcaggctcccgaaattattgcgctttatgatcaaggcgatgagcaggcaagggcgcacgttgagcgttatctggatttattagcggtttgtctgggaaatatcctgaccatcgttgaccctgacctggtcgtcattggtggtggcttaagcaatttcccggcaatcacaacgcaactggcggacaggctgcctcgtcatctcttacctgtagctcgtgttccgcgcattgaacgcgcgcgccacggtgatgcgggaggaatgcgtggtgcggccttcctacatctaaccgattaaacaacagaggttgctatgctgagccgtcggggtcatcggttaagtcgttttcgtaaaaataaacgccgcctgcgcgagcgtttgcgtcagcgtatttttttcagagataaagtggtgccggaagcaatggaaaaaccaagagtactcgtactgacaggggcaggaatttctgcggaaagtggtattcgtacctttcgcgccgcagatggcctgtgggaagaacatcgggttgaagatgtggcaacgccggaaggtttcgatcgcgatcctgaactggtgcaagcgttttataacgcccgtcgtcgacagctgcagcagccagaaattcagcctaacgccgcgcatcttgcgctggctaaactgcaagacgccctcggcgatcgctttttgctggtgacgcagaatatcgacaacctgcatgaacgcgcaggtaataccaatgtgattcatatgcatggggaactgctgaaagtgcgttgtagtcaaagtggtcaggttctcgactggacaggagacgttaccccagaagataaatgccattgttgccagtttccggcacccttgcgcccgcacgtagtgtggtttggcgaaatgccactcggcatggatgaaatttatatggcgttgagcatggccgatattttcattgccattggcacatccgggcatgtttatccggcggctgggtttgttcacgaagcgaaactgcatggcgcgcacaccgtggaactgaatcttgaaccgagtcaggttggtaatgaatttgccgagaaatattacggcccggcaagccaggtggcgcctgagtttgttgaaaagttgctgaagggattaaaagcgggaagcattgcctgatgcactacgcttatcaggcctgcaaggggacgcaattaattgaatttgcgggttttgtgggccggataaggcgttcgcgccccatccggaataatacacgcgcacttttccggcctcttttatcgtttactcgtcaataacaatgcggcaataaacgtacagacaccaattagccctgcccagagtgggcttattctggtaatcgcaaagctattatcgatatacaaacataaagcctgataacccatattggcaatagtcatcgccactgcaaattttaacgcataaataaaacgagtcgtgtagtaaaagatcctggaaaataagataaacgtcgcagcccaggcgataaaacctaatgtgttggtgctgccggggggagcattttcatgctgttgtcctggatgcggataatacgttagtggcggcgtgctttgttttaatatctgtgcttgtagaacagccaatgcattattgattccctgataccagagatctgcatttaaataagccagcgtgtgattttctatcagaaggccgagatgtttatcgtccagaccactttcaacctggccgttggtgatcataattaaccgtggttcgcgggtagtaaatagtaacagaacacttccttttacatcactcaaactagaactcgcatgcgccagcatcgctttaccattttgtctgagactggcttcattattaatgtcgggtaaaaccacaataaacggtgcaattcccgtttgttggcgaaaaagctcggctttatgcgcgatctcttcagcatctggtacagtaccggtaacgtccgtaaaaagtgtcttcattattggaattaatggcttgctggctgctgtcagaggcaggagtatcagtaaactgagcagtataatgaattttttcatgggcgggacttccgtttcctgcgactttttttagaggagggcatacttattaataaaccgacggcgataaaaataacgcccataatgccgataaacccccatttaaaaaaattaacccacgggttatttatctcagccttttcaggatgcccgggagaataataaacattaactttatcgccttcgctgtcttcataaaaatcgctgccgatactgctattgaaaattagcgtgtaatctggcgtcggtcgaaaggcaacgacgggataccagctaccatctttacccgtgcgatgagaatgactggagtgccagacggtatcaacaatgacgccttcggtatgaatcgcgtctttgctataggtgaactggttataaaagacaacaacagaaatgaggatcagtaccagaccgataccgaggaatatacgaaagaaaactttactgtcctgactcattagccacatccttgctaactaaaaaacgggcggtaataccaccgcccgcttgctgaattaacgtcctgctttcagcttctgataatactcttcataaatgctgctggctgcgccaacgtcattctgccattcgccatttttaatggtttcagcatccgggtagagtgttttatcgttcgccacttctggacttaacagcttacgcgccgcaaggtttggcgttggataaccgatagtttcagcaacctgttttgccacatccgggcgcagcaggaagttgatcaatttcagcgcgccttctttgtttttggcatttgccgggatcgccaggctgtccatccagaaaatgccgccttctttcggccacaccacgtcaattggcgtacccgcctggcgtgcaacgaaagcagaaccgttccagatcatgccgaggttaacttcgccttccatgtacgggttcgccgggttatcggagttaaaggctgccacgtttggcatcagttttttcagctcgttatatgcagcttcaatctctttcggatcggtggtgttaccggagtagcccagcttacgcagcgccatctggaacacttcacgggcatcgtcggtcaacagcaggctgcctttgtactctggcttccacagatcggcccagctggtgacagatttcggatccaccgcatcaccgttaacaccaatcgccgtcgcaccccagatatacggaatggagtagtcgttattcgggtcaaaaggcttgttgagcatgtctggatcgagattgctgaagtttgttaacttgctcttgtcgatcttctggatcatcccttctttacgcattttatcaacgtaataggtactaggaaccaccagatcataggcaccgtctttgtatgttttcagcttggcgtacatggtttcgttgctctcgtaagtgctatagataaccttaataccggtttctttggtgaactgttcaagcagtcctggcggcacgtactcggtccagttgtagaaatacagcgtgttgttgtcatcggcgtgagcggcgctcatgcccagtgccagagcacccgccgcgagcaggtggcgactccattttttcatttaacgtcccctgtgttacctttcgttttatcacgagcaataagctggctggcaataaccatcaccaggctcagcaccagtaatatggttgccagcgcgttaacttccgggcttacgccgactttgaccatgctataaatttttaacggcagaatttcataacttggtccggtgacgaagctagaaactaccacatcgtccatgctcagggtaaagcttaacacccagcccgccgccaccgctggcattgccagtggcagaatgatttttcgcagaatggtaaattcgctggcaccgagatctttcgccgcttccagcattcgcacgtcaaaacctttcaggcggctatacaccgtcaccaccacaaatggcaggcagaaggtgatatggctgaacagcaggctccagaagccaagctgaatacccagcagcataaacagcaccagcaggctaatcgccatcacgatatctggactcatcatcaccacaaacagcattccgctaacgaacggcttaccacgaaagcgataacggtacagcgcaactgccgtcagactaccgataagcgtagcaaacgtcgcgctaaacaccgccattgttagactatgctgcgctgcctgtaacaggctgtcgttgttcatcagcaggctataccatttggtggtaaagccctgccagttgatgccaaagcggctgctgttaaaggagttcacaatcaaaataatgattgggatatacaggtacgcgtagatagcggtcataaaaccgccgcgaagcagtcgaccgatcattcgagttccaccttcttattcagcaaacgagaagcgcgccagtaaaccagcaacatcaggcccattacgatagtcagcgtaatgctggtagctgcaccaaacggccagtcacgaatattaaggaactggaccttgatgacgttaccgatcagcaggtttttcgcaccgcccatcaggtcggatacatagaacaggcccatcgctggcagcatcaccagcagacatccggcaataattcccggcatcgtcagtggaataatgatacggataaaagtctgtaacttgctggcaccgagatcgcgcgccgcctcaagcaacggcttatccagtttttcgatactggagtacagcggcatcaccataaacggcagcagaatgtaaaccagaccgataatcaccgcactgggcgtgaacatgatacggattggtgtgtcgataacgcccagccagagcaaaaactcgttgagatagcctttggtgctgaggaaaattttcagcccgtagatacgaattaaactgttggtccagaacggaacaatcagcagaaacagcagcagcggacgcaccttgtgtggcaacttcgccagaaaccaggcaaacgggtagcccagcaccaggcaggcgagggtggcgatcagcgccatattcaggctgtgcaatagcacttcaaaatagagcggatcgagcagacgcgtgtagttatccagcgtaaagaccattttgacaaaactggcgtcgtcgcgggtcaaaaagctggtgccaatgatcatcaggttgggcagaaagacaaacaacacaagccaaccgacaatagtgacaatcactacattctggaacttacttgtgttcttcatcagccagtacgacctcccagctttctacccaattaatggccattttttggtcgagagagtggtcaaagtcaggatcgtcttcattgaagaattcgctgaccatcaccatcttgccattttccagttcaacaacgctctccagcgtcatgcctttgtagttacgctcgcgaacgtaaccaatcagcccttcagcgtggttgtcgtcgttaatctcttcaacacgtaagtcttccgggcgcagcagaacatgcagtttttgccccggttcaacggcgaagttaacgtagatattacattcgcggccttcaacgttggcgcgtacgcgctgctcgtctagacgttcgatgacagtggcgttaaacatattgatttcgccaatgaagccggcaacaaacaggtttttcggctcttcgtagatttcacgcggcgtgccgtcttgctcaatgcgaccatcgcgcatcaccacaatcctgtcactcatggtgagtgcttcttcctggtcgtgagtcacaaagacgaatgtaatgccaagcttacgctgtaacgctttcagctcgttctgcatttgcttacgcagtttgtaatccagcgcactgaggctctcatccagcaacaacagacgaggcttgttaaccaccgcgcgagcaatggcgacgcgttgctgttgaccaccagagagctgatgcggtttgcgttgagcgaaggtttccaactgcaccatccgcagggcttccatcacgcggggcgtaatttcagcagcgggggttttttgcatgcgcaacccaaaggccacattttcgaacacggtcatgtgggggaaaagtgcgtagctttggaaaacagtgttcacatagcggttttccgccggaacgtgggtgatgtcctcgttatccagcatgatgcgtccggaatcaacagtttccagacctgcaatcaggcgaagaacggttgttttaccgcagccagaagggccaagcagcgtgaggaactcgccattgttgatagtcagatccagctggggaatgacctctttaccatcaaagcatttgcgaattcccgccaattgcaccagcggactaaggctactcggttgtttattcaattttttactctgtcccatgtaaacgcaacggatggcttaccgatgcggggtttgtggttaaccaccttggtgactcttaatgagggcggtaattctacggcaaaccgcttgaatcgccaatctttgttgtgaattactggcttagctttatattcattaaggtaatgctgataaatattcccgcttgcaggggtaaaagtgacctgacgcaatatttgtcttttcttgcttcttaataatgttgtcacaaaaagtgagggtgactacatggataaactacttgagcgatttttgaactacgtgtctctggatacccaaagtaaagcaggggtgagacaggttcccagcacggaaggccaatggaagttattgcatctgctgaaagagcagctcgaagagatggggcttatcaatgtgaccttaagtgagaagggcactttgatggcgacgttaccggctaacgtccctggcgatatcccggcgattggctttatttctcatgtggataccagtccggattgcagcggcaaaaatgtgaatccgcaaattgttgaaaactatcgcggtggcgatattgcgctgggtatcggcgatgaagttttaagtccggttatgttcccggtgctgcatcagctactgggtcagacgctgattaccaccgatggtaaaaccttgttaggtgccgatgacaaagcaggtattgcagaaatcatgaccgcgctggcggtattgcaacagaaaaaaattccgcatggtgatattcgcgtcgcctttaccccggatgaagaagtgggcaaaggggcgaaacattttgatgttgacgccttcgatgcccgctgggcttacactgttgatggtggtggcgtaggcgaactggagtttgaaaacttcaacgccgcgagcgtcaatatcaaaattgtcggtaacaatgttcatccgggcacggcgaaaggagtgatggtaaatgcgctgagcctggcggcacgtattcatgcggaagttccggcggatgaaagcccggaaatgacagaaggctatgaaggtttctatcatctggcgagcatgaaaggcaccgttgaacgggccgatatgcactacatcatccgtgatttcgaccgtaaacagtttgaagcgcgtaaacgtaaaatgatggagatcgccaaaaaagtgggcaaagggttacatcctgattgctacattgaactggtgattgaagacagttactacaatatgcgcgagaaagtggttgagcatccgcatattctcgatatcgcccagcaggcgatgcgcgattgcgatattgaaccggaactgaaaccgatccgcggtggtaccgacggcgcgcagttgagctttatgggattaccgtgcccgaacctgttcactggcggttacaactatcatggtaagcatgagtttgtgactctggaaggtatggaaaaagcggtgcaggtgatcgtccgtattgccgagttaacggcgcaacggaagtaagcgaaaagggatgcggcatgtgatgccgcatccggcttaaatccaaacttacccttcgaagaaccaatacccgctattgaccagcgccgcgagcatcgcgaggaaactcggatcttccagcgcatcgccaaaattctccgcagtcagcgcaatgttgctggcgagtgcatccagtgccggacggtgcggggaatcgatcttctcaccattggcatacacgtcgtcgccaatgcgcaatacgcgcagaccacccaggcgcaccagcacttcaccttgtttcagcgcatcgtagatttcatccggctgataaggcggctctggcggcgcgatatccagttcatgacgactctgggatataaactcgccaaaccattgcttaaagtgttccggctggttgatcaattcgagcatcatctcacgcagtttatccatctcttgcggcagaacatccgcaggatgagcgcgaggtggaacatccggatcgctgtagtagttgccgcccagttcacgttgcagcacataatcggcaaatccactaatcagttcccgcgtatttggcgcgcgaaagcccacggaatagttcatcgcattttccagcgcgtagccttcatgcgggaatcctggcggaatataaagaatatcaccaggctccagctcttcatcgatgatggcttcgaacggatcgacctgtaacagatccggatgtgggcagtgctgtttcatttgcagcttttcgcccactcgccagcgacgacgtccggtaccctgaatgataaacacgtcgtactgatcgagatgcgggccgacgccgccgccgggtacagaaaaagaaatcatcagatcatcaatacgccagtccggtagttcacggaacggtcgcatcagcgcggcggtcggctcatgccagtggttcactgcctgtaccagtaaactccagttggtttcaccgagatgatcgtagctttcgaacgggccgtggctgacctgccatttgccatcctggtgactgaccagtcgactgtcaacttcgctttccatcgccagacccgccaactcgtctggagagatcgggtcaataaaattattaaagccgcgttttaacaccaccgggcgtttctgccagtgacgttcaagaaaatcgggccagttaagagtgagttggtattccatgttaagcatccacaggctggtatctgcaaccgattataacggatgcttaacgtaatgcgtgaagtatgggcatatttattcatctttcggcgcagaatgctggcgaccaaaaatcacctccatccgcgcaccgcccagcatgctctctccggcgacgattttaccctcatattgctcggtgatttcgcgggctaccgccagccctacaccttgcccagggcgtaaagtatcaacccgttgaccacggtcgaaaatgacctctcgcttgcttaatggaataccggggccatcatcctcgaccacaatatagagatgctcgtcggtttgccttgcagaaatttcgacaaactcgaggcaatatttacaggcattatccagcacgttgcccatcacctcgacaaaatcgttctgctcaccgacaaagctgatctctgggctaatatcgagagagatattgacccctttgcgttgatacactttgttcagcgcactggtgagattgtccagcagtggggcgaccggatgcagctcgcggctgagcaatgtcccgccgcgcatactggcacgatgcaggtagtagccaatttgctgactaatgcggctgatttgctccagcattaccggctcagcatcactgacgctcatcttttcactacgcagagaacgcagcgtactttgcagcaccgccagtggcgttttcagactatgggtcaggtcggtgagcgtcgtacggtatttgtcgtaacgttcgcgttcactttttaacaatcggttcaggtttcgtaccagactggtcagttctcgcgttgtggctggattgagcaattcgcggttatgttcttccagttcgcggacttcttttgccagggcttcgatggggcgtaaactccaccaggcggcgacccacagcagcgggatcactaacagcagattggcactgagcacatagataaaccagctccagaccatataggaactttttagctccaccggaatggtatccaccaccacaatggttaattttggcatccggcttgttgccgggtagacgtttactgccacgctgtgggtcatctccgcgtcgtcatcatcttcccgcacttcctgcaactgttgctgtatgctatgatctccactcagcaagaggctggtatcgttaacatccgcttcaatttcatgaaaaccattgcttttcagccagtcaggctggatcatcttcatcagccagggcacgtcacgttgcgcccataaaagctgcccgttctcatcataaattagcgtcatggtggggctttgcttgtcgatattttcgggtaactcgacatgcaacttattgttttcccacttcgcaagggtatagaacagattgctctcgccacgtaacagccgaaacgtagttttatcgaaactgacgctataaccgatcagcgcgaccattccgtaggcaaggctaagcaccagtactaccgctgccgttgccaacagaaaacgtacccgcaggctgagcgggaaaaaaagacgcagtaattttttcatcagcgcaattcgaacagatagccctggccgcgaacggtggtaatcacttcttggggatattgtgcctgaatttttttgcgcagacgtcccatcagtacatcaatggtatggctttcccgcagctccgcatccggatagagttggagcattaagctatctttgctgaccactttgccattattgcgtatcaacgtttccataatagtgtattcgaacgcggtcagtttgatcacttcgtcattaatagataattcacggcgagagagatcaacctgaaacggggggaggctaatgacctgactagccagaccgctattacgccgcattaatgcctgcattcgcgccatcacctcttcaatatgaaacggtttagtcacataatcatcagcaccggcacttaatacttcgactttgtcctgccagctttcacgggcggttaataccagaatcggcagactaacatcgttgctacgccagcggcgaatcagactcagaccgtcctcgtctggcaatccgagatcgacaatcgcaatatccggtatatgttcattgagataataatcggcttctttggcatcttctgcgtcatcgacctgatgaccagcatcctgaatctgaactttaaggtggtgacgtaacaacgcattgtcttcaacaaccagtacgcgcatttttatttctccctgtcttaattattaaaatagtgtaacgcgattatgtggttatgggggtaaacattaaataaaccagcggggaggggaggtaaagtgaaaaaataaaaagcggataatcttaataagcaggccggacagcatcgccatccggcactgatacgaggtttatttcagctcatcaaccatcgtgatagctcgaccaatatagttagccggcgtcatcgctttcaggcgggctttctcttcttctggcaacgccagaccatcgataaactgcttcatgccttcggcgtcaacgcgcttaccgcgagtcagctctttcagcttctcgtacggtttttcgatgccatagcgacgcataactgtctggattggttcagccagcacttcccagttgtgatccagttcatccagcagatggtcacggttcacttccagtttgctcacgcctttcagggtggattgatatgcaatcaaggcataaccgatacccacgccgaggttacgcagcacggtagagtcggtcaggtcacgctgccagcgggaaaccggcagtttgcttgccagatgctgcaataccgcgttggaaaggcccagattcccttcggagttttcgaagtcgatcgggttaactttatgcggcatggtggaagaaccaatctcaccagcaatggttttctgtttgaagtggttaagggcgatataaccccagacgtcacggtcaaagtcgatcagaatagtgttgaagcgcgcaacgcaatcaaacagttcggcaatgtagtcgtgcggttcgatctgggtggtgtacgggttccactgaatacccaggctggtgacgaactcttcgctgaactgatgccagtcaacttccgggtaagcggcgatgtgggcgttatagttaccgaccgcgccgttgattttgccgaggatctccacctggttaagctggcggtactggcgctccatacggtaggcgacgtttgccatctctttaccgatggtactcggcgtggctggctgaccgtgggtacgagacagcagcgggatatcgcgatactgaacggcgagatctttaatgccatcaatcagttgacgccagtatggcaggatcacttcatcacgcgcggttttcagcattaatgcgtgggagaggttattgatatcttcgctagtacaggcaaagtggatgaattcagaaaccgcgtgcagttccgggatctccgccactttttctttcaggaaatactcaaccgctttaacgtcgtggttagtggtacgctcgatagttttgatgcgcgccgcatcttcttcgctgaaactggcgacgattgcatcaaggtaaccgattgcgtcggcagcaaaagcaggaacttccttgatcgctgcgtgcgcggccagtttttgcagccaacgtacttcaacttgtacacggaatttcagcaaaccatattcgctgaaaatcccgcgcagcgcgctgactttatcgccgtagcgtccatcgacaggggaaacggcggtcagactggataattccatagatcacaactccggggttaaatgagcaagaatttgttttgcctgagtggtcaggcgattacgagaaaacatcagttgcagacgtccgccgccgacctggtgccagagcacggcggcgcgaatgcctgccagcagggttgcgcgaactttcgcctgcacttgtgggctttgcagtacagcaggggaaccggtgacctgaatgcgcgggccaagcgggctaatcacatcaacatagatagcagccatcgcgctcatcagcgtttcggactgtaaatcgaagtgttcgagctggcgttgcaggccgttgatccggttgcccagagtgtcgagcgcgcctttcgcactggagagtttgcgctcaagcaccatcaagctgagtgtgtagcgggttaattcggcgtttaagccctggcgactgctggcattgagcacgccgagcagggtttccagcccgacgcgcaggttggcttcgctaccgccaaaaaccgccagcgtgctgctggggttcatatcaataatactgttgagactgacgtgtagcgcatcggcatcacaatgcccctggtgagcgagttgttgcaccaggcgtgcgctctgacaaataccggccagggcgagggtgatgtcatagtaattctttgccacgttcactgcttccttgttttaagtaaagataataatcagaccggcagcggcagacgctgctcaataataccgccaccgaggcacacttcaccgttatagaagacggcagactggcccggcgtcacggcggcaaccggttcatcgaaaatcacttcaatgcgatcatcgtccagcgccttgacggtgcaagggatatcggtctggcgatagcgggtttttaccgtgcaacgcatagtgccggtgaatggttcgcgatcgacccagtgcaactgctgggcaatcaacccgacagacatcagccgcgggtgttcatggccctgagcgacaaccagaatgttgttttcgacgtctttgtccaccacataccacggttcttcggtaccttctttggtgccaccgatacccagacctttacgctgaccgagagtgtgatacatcagcccctggtgctcaccaatttcatcgccatcgacggtaatgattttgcccggttgcgccgggagataacggcccaggaactcgcggaatttacgttcgccaatgaagcaaatgccggtagagtcttttttcttcgcggtgaccagaccaagatcttcagcaatcttacgcacctgcggtttttccagttcgccgaccgggaacaggctttgcgcaatctgctcatggctgagcgtataaaggaagtagctctggtctttattgctgtccagaccacgcagcaggcggctcttgccatcgacatcggcccgacgtacgtaatgaccggtagcgatataatcggcacctaaatcttcggcggcaaattcgaggaaggctttaaatttgatctctttgttgcacagaatatccggattcggcgtgcgaccggctttatattcggcaaggaacagttcgaagacgttgtcccagtactcggcagcaaagttaacggtgtgcagttcaatgccgagcttgtcgcagacagcctgggcatcagccagatccgctgccgctgtgcaatattcctcaccgtcgtcttcttcccagttcttcataaacaggccttcgacctgatatccctgttgttgcaacagccaggcagaaacggaggaatcgacaccgccggacatgccgacgattactttttttgcggtttcagacattggatcactcacgacattgaacttcaaggcggcgtattctatcacgcagccttttagatgacaccctttgtaaaaggccagttaaaatcgccaatcatctccagcggataacgttgcccgctttgataacaacgaatactttccgccaccagcgggctacgaagattactcgcctgtaaaatttcttcggcgctgacccaacggcagcagtcgatatcgctgtcatgaggctgggtcgggcatatttgctcaagctcaatggcaaagaggaaacgcaaaaacggcgttttatctggcgcaatccactgatgcatacgaataaagtgttgcggctgcgcgctgatgccggtttcttcccacagttcacgggcggcggcttccactaaggtttcatcggcttccagatgcccggcaggttggttccataacgctttaccattaatcgtctcttcaacgactaaaaatttgccttctgcgtgcaccacgcaagcaacggtaacgtgcggtttaaacattttgcatccttaatctgtcacttctcgccattcaccattggcaagattatccaaagagtaatcacccatcgcatagcgaatcagtcgcagcgtggggaagccaacatgggcggtcatgcggcgcacctggcgattacgtccttcatataaggtgatcttcagccagctggtgggaatacttttgcgttcacgaattggtggattccgcggccataaccacgcgggttcgtcaaccagctccgcgccggcgggcagggtagggccatcatttaaggttacgccattgcgcaaggcttcaagtgcgtcttgtgtgggaataccttccacctgcacataatagatttttccggtgcgtttacccggctgggttaaacgcgcctgcaacgcgccgttattggtcagcaccagcaacccttcgctatcgcggtcaaggcgacctgctgcataaacaccctgaaccgggatgaattcttttaatgttttgcgtccggcttcatcggtgaactgcggaagaacatcgtagggtttattgaacaggatcacacgcgtgggctggttttcaggtttacgcctggtagaacgttggctgctgaatcgcttaacctggtgatttctaaaagaagttttttgcatggtattttcagagattatgaattgccgcattatagcctaataacgcgcatctttcatgacggcaaacaatagggtagtattgacaagccaattacaaatcattaacaaaaaattgctctaaagcatccgtatcgcaggacgcaaacgcatatgcaacgtggtggcagacgagcaaaccagtagcgctcgaaggagaggtgaatggaaagtaaagtagttgttccggcacaaggcaagaagatcaccctgcaaaacggcaaactcaacgttcctgaaaatccgattatcccttacattgaaggtgatggaatcggtgtagatgtaaccccagccatgctgaaagtggtcgacgctgcagtcgagaaagcctataaaggcgagcgtaaaatctcctggatggaaatttacaccggtgaaaaatccacacaggtttatggtcaggacgtctggctgcctgctgaaactcttgatctgattcgtgaatatcgcgttgccattaaaggtccgctgaccactccggttggtggcggtattcgctctctgaacgttgccctgcgccaggaactggatctctacatctgcctgcgtccggtacgttactatcagggcactccaagcccggttaaacaccctgaactgaccgatatggttatcttccgtgaaaacagcgaagacatttatgcgggtatcgaatggaaagcagactctgccgacgccgagaaagtgattaaattcctgcgtgaagagatgggggtgaagaaaattcgcttcccggaacattgtggtatcggtattaagccgtgtagcgaagaaggcaccaaacgtctggttcgtgcagcgatcgaatacgcaattgctaacgatcgtgactctgtgactctggtgcacaaaggcaacatcatgaagttcaccgaaggagcgtttaaagactggggctaccagctggcgcgtgaagagtttggcggtgaactgatcgacggtggcccgtggctgaaagttaaaaacccgaacactggcaaagagatcgtcattaaagacgtgattgctgatgcattcctgcaacagatcctgctgcgtccggctgaatatgatgttatcgcctgtatgaacctgaacggtgactacatttctgacgccctggcagcgcaggttggcggtatcggtatcgcccctggtgcaaacatcggtgacgaatgcgccctgtttgaagccacccacggtactgcgccgaaatatgccggtcaggacaaagtaaatcctggctctattattctctccgctgagatgatgctgcgccacatgggttggaccgaagcggctgacttaattgttaaaggtatggaaggcgcaatcaacgcgaaaaccgtaacctatgacttcgagcgtctgatggatggcgctaaactgctgaaatgtagtgagtttggtgacgcgatcatcgaaaacatgtaatgccgtagtttgttaaatttattaacgggagcgtaacgctcccgttgttttttgttaggctgctaacggttatcaaaattttatcaaaaaaagttatcaaaacccctcggtagttttggggtaggctggccggtcaggtggtagttctactactagtctcccacatagatattccttagctttttattattgctggcggacgctcgttaatatttaaggtcttcattgattaagacatccccaaagttagttatgtattcactgttattaggacaattatgaattaccactccttacacccgctcaaatattgttaaattgccggttttgtatcaactactcacccgggactcgccaggggacagccaacaggcattgggtgcaatcaccttagcgttcaggtacatgcggaatgtaaaaaaggccgcgagcgcggccccttcacatacatctttagtactgagactgtttaacctagggaattattatcgtattatattgcattacaactcccaacagtgacatatgaacttcctgctttactccacgactttaatatttcaaggccatgtgaagaacatatttcttgcactgcgagttcatcgagtaatccatagtaagaaacactttttgaatttttgtaaatgtatccgtaaagatgttttcttcctgtttcgtattttttgaagtatgagcttttatattgatttacaataagagtctcacctcctgattttagtaatctcttgatgctaagaactatcagataattcaaagcgtggctgtgatgataggaattatgttttttacgtgaatgagaataatcttaaatgaggaataactcattgattgacaatatttttattcaagaagtgtcattgactgttaacgcaatgttgtaaaggtaagataatctgatttatcaatattattgtgtgatttttatgtgagcagaagatattcatcagcaacgattacattagtcattttattttgccgacggcctcattgtcgaaagataagcgtacgacagtattatcagaaaagagtgattttttatccaactacacttcagcgcactgcgtgtaaaaaatgcctctttcttatgcgggatatcatcatttcatcatgatgtctttggtgagcggtgaacacaatgcacctgcgctgtctcttcaggatgaatcccctggtctggtgcctgcgggctgatgttgcagcagagcttaggagtcttagacgctactatcatttatccaatggcatggaaagcaaaagtgtcgatacccgcagtatatatcgtgaactgggtgcaacgctgagttacaacatgcgcctggggaacggtatggaaatgaaccctggctgaaggcggctgtgcgcaaagaatttgtcgatgataaccgggtgaaggtgaataatgacggtaatttcgtcaatgatttgagcggcagacgtggaatataccaggcagctattaaagccagtttcagcagtacgtttagcggacatctcggggtggggtatagccatggtgccggtgtggaatccccgtggaacgcggtggctggtgtgaactggagcttctgaccatcaacgattaaactgcgcttcggcgcagttttcgtttacaggatgttgaaagggaaaattctggggcaaaaaaagcccgccagttacggcgggaaacctcatcctatgggagaacaatgaataatgaaattgcggggttatcatctcccagtatatccatactaacaataaggttatttactcaaccaggcataaacattttgttttgtgcgtgggaacagccttaaggtgtaaagggggaggtggaaatagcaatgaggagtatcagcaagaatactcgccgctttaccacaacgtggatgagagggatgaaaaactcaaggcagagataactctgccttgaagataaatgcgcttttacagcgggcttatttcagctcttctgcttccggtaaggtcacgttcagctcaagaatagaaatatcgccatctttttgctcaagctgtacggttaccatctcaggatcaatttgtacgtatttacaaatgacctcaagaatatctttacgcaactgcggcagataatgcggttctgcatcgctgcgacggcgttcagcaacaataatctgcagccgttcttttgcaatgttggctgtgtttttcttccggctgagaaagaaatcgagtaatgccataacttatcctccgaacaagcgtttgaggaagcctttcttctcttcttcaatgaagcggaaaggacgttcttctcccaacagacgttctacggtatctgcgtaggctttacccgcatcggcgttaatgtcgagaatgaccggttcaccctggttagaggcgcgcaatacactttgatcctctgggatcacgccgacgagtttgatgcgcaggatctccagcacatcttccatgctcagcatgtcacctctgcttacgcggcctgggttatagcgcgttaacagcaggtgctctttaataggctcttcgccattttctgcgcggcgacttttgctcgccagaatgcctaaaatacggtcagagtcgcgtacactggagacttccgggttggtggtaataatggcttcgtctgcaaaatagagtgccattaacgcaccggtttcaatccctgccggggagtcacaaacgataaattcaaaatccatcgctttcagatcatcaagaactttggcgaccccttcacgggtgagggcatctttatcgcgtgtttggcttgccggcagaatatagagattttcagtacgcttatctttaattaacgcctgatttagcgttgcatcgccctgaatgacgttgacgaaatcgtaaacgacccggcgttcacaacccataatcaggtcgagattacgcaggccgatatcaaaatctatcacgacagttttctttcccttctgggccaaaccagtggcgatggccgcgctggaggttgtcttaccaacaccccctttgccgctagtaacaacaataatgcgtgccatagaaattccttgttaaaaagggatcaatttaacggttgaacggtcaaagcgttttcgactaactgcagtcgcgccgctttgccataaaattctgctgggatttgatcactcagccagtattcacctgcgatggacaccagttccgccatcaggttcgtacaaaatatttgcgtttcccggtcaccacttgcccctgccagcgcacgaccgcgcatcatgccatagacatgaatgttcccatcggcaatcaattcggccccagcgctaacgtggcttgtaacaatcagatcacattgtggagcataaatacgctgaccggaacgcaccggggtatctattaaacgcgtttttgtgaccggcgttgtattttgcgctggagcctgcggtgtgggagctggacgtggcgctttttcctttccttccgtcaggataggcagccccatcttttcaatttcggctttaagttgcgcatctttgcagccacttacgccaataacccgcaaaccggttgcgctaaccgccttatgcatcgcactccagtttaccgggtcttccagtgcactgacgttgagtacaacgggggcatgttttaaaaatgcgggggcctgagcgattttgtcttccagcgcctgatggataaccttaggttctgcctcatgcagatgaaccacagataaagtgaagctactgcctttaagctcgattggcgtgttactcatcctggccttactcaattagctattaatcatcgccagcgcgcgatgatgttccgaagactataaggcatgttatagtctggattatattgaggcaagtcaccctcccatttattcagagtaaaagtctattctgtgataaatggcgctgattcatagcttaaaaaatacccttgtcaatcaacccattgccgtcgtacttttgattgttcttatttacgcttcctttttccgcaccctaatcgtgacagcatctccagacctgtttaaatatccagtattgaggcaagtgtattttttcaccacgccaggctttcttaactttccattttttgcggcatcattaaagaacagatacccgttatcttaatatccgccacagaattgctctatcatagaaaccgcagaagacgtctgatacttctgtcaggtcatcgtaactcgtccaggtcagcggttttgattacggattgatgatgaaatgagcataagtgttgtacggttggattatcaggatgtgctatgaatatgatgcgtattttttatatcggattgagtggtgtggggatgatgttcagtagtatggcgtctggaaatgacgctggcggacttcaatctccggcgtgcggcgttgtttgcgacccgtatatttgtgtgaacagtgatggcatttccccagagttaacaaggaaatatctcggcgaaaaagccgctgaaaacttacaaagtttacaaggctacgatcccagcgaatttacattcgctaacggtgtattttgcgatgttaaagaaaaattatgtcgtgatgatcgttattttggtgtggatggtaagcggagtggaaaaatcaatcaaaccaccacaaagatgttatttatgtgtcgtgagtgatgtcttgtttacattatgttctattcgtcattaacctcttgagcgacagagaggagtggggcattaacgtttatgacggggagagtccccgtcggttgacatttacttaatttgaatatcgacgttatattttttagttttgtttttacgggcgtcgtttcgggtttgcaacactcgcagctcatatttgccagaagcagggagactgtattgtccgtgactatcgagttctggggaatatctggataaatcaacactatcatcgattcctggcccgaagaggtaagtatcagcgccttcattagagatactcacatgcactttctgaccttttttggcatagaaggtatatgtatcgtaatcgtatccctttatttcgccggagtactgagcgctgctatggccttttctgaactcaacattgacattcttacccgcagcaaagctcgtggaggttagcagtgcaagcagcaatacagccttcctgatgctcttgattttcattggtagtctcctgttcagaatgagtacgatgaactgttataatataacaatccctaacgggagaattccagtggctttcctgcgttcggtaaaatcacgttgcggcatttttgccggggggattacttataaagggggcatggactcaacaaaccgtagaaatctacagctggctggcttgtggcgcgggtttcattgatgttagcttatgccaaaacctggcatcttaaagagtaaaagtatgttttgtgtgatttatcgaagcagcaagcgtgaccagacctatttatatgtcgaaaaaaaagacgattttagccgtgttcctgaggaactgatgaaaggttttggtcagcctcagttagcgatgattctgccgctggatgggcggaagaaactggtcaatgccgatattgaaaaggttaaacaggcattaaccgagcaaggttactatttgcagttaccgccaccacccgaagatttgctgaagcaacatctttccgtcatggggcagaaaacagacgacactaacaaataaccgatatccggcggtggcattatctttgtcggcgcgggttttcatatccacgataaggtgaggggaacgttatgtatcaacatcacaactggcaaggtgcgctgctggattatccggtgagtaaagtagtctgtgttggcagtaactatgccaaacatattaaagagatgggcagcgcagtgcccgaagagccagtgctgtttattaaaccagaaacggcactgtgcgatctgcggcagccattggcgatcccatccgatttcggtagtgttcatcatgaagtcgaactggcggtgttgattggcgcgacactgcgtcaggctacggaagagcatgtccgcaaagccattgccggttatggcgtggcgctcgatctgacattgcgtgatgttcagggaaaaatgaagaaagccgggcagccgtgggaaaaggctaaagcgtttgataactcttgtccgctttccgggtttattcccgcggcggaatttaccggcgacccgcaaaatacaacgctgagcctgagcgtaaacggcgaacaacgccagcaaggtacgactgcggacatgatccataaaatcgttccgctgatcgcttatatgagcaagttttttaccctcaaggccggtgacgttgtgttgacaggcacgcctgatggcgtcggcccgttgcaaagcggtgatgagctgacagtcactttcgatgggcattctttgacaactcgcgttttgtaatactttttgccgcctgaaagcggcggcaaaacttgcatcgctgtgccagactggttataaggtgcgttttaacgtaatggcggaacacctgatgagcgatgtacctttctggcaaagtaaaaccctggacgaaatgagcgatgcggaatgggagagcttgtgtgatggttgcggtcagtgttgcctgcataaactgatggatgaagacaccgacgaaatctacttcactaacgtcgcctgtcgccagctcaatattaaaacctgtcaatgtcggaactacgaacgtcgtttcgagtttgaacccgactgcattaaattaacccgtgaaaatctgccaacattcgaatggctgccaatgacctgcgcttatcgtttgctggcggaaggtaaagatttacctgcgtggcatccgctacttactggtagcaaagcggcaatgcatggtgaacgtatctctgtgcgtcatatcgcagtgaaagaaagtgaagtgattgactggcaggatcatatcttaaataaacctgactgggcgcagtgataaatttaatagatgctgatgggggctttcttaatatacgtctggatgctcgccatttcgtagccctgtttttgaaagcgctctgtcataatgagagttacccgataccttattatcaacaggtaactctcaatctttaaaaaacgtctgtgtttttaaatgtgataaaccttataccttgagtacatggagagaataatcgcttatcagacttcaggtacctcaaagagtgtctttttaccgtgtcttttctgatactcattacaggtgttaatcatttttttggccgcttcttttagcaaagaaagcattaaatcatcataatcaacgtagaatctggttgtttcagtttccgtttttatctcaccgatggcggctatttcggtggttaatttcaatttggcggcatcgatatctttattcgcttgtttaaccgtgttagacagggtggtaaagaaattctgcacagattttaacttgttcttcaattctggaatcagttttccttcaactacgcccgcagcaatagaataggaaatgattaatccaaatggaccggcgacgacaccggctgcggcaccggcatatgcttccttcctgattttatctacctgactctggaaatagctgcttttttcactaaaatcattggttaactggctatctaacgccagcagtttcccggaagcgttgttgaaactttgactgcttaccagcagggatttttgcgcttcattcagcttcgtgatgccgtcatccagtaccttaatgagaatgtctttctgggcggatgctttcttctcattgtactcatcaaatagcaaaatatacgctgcgagcaattgcgtcgcaacaccacaccattcatacactgtttgggttgcttcaaaatacttatcctggctatccataagtaaggttttaatatcgccgactaaaacggaggctgcctgactatactcctgtttaaagcgacttaactcttttatggtttcatcaaaggtctgccaggggatgacctgatcgagatatttattataaagatctaatgctccatctgcggtttcgattgcgtttttaactacttctaccgttttatctgcaacgatttcagtcataatcattcgcctctttaaatatataaattgtaatgaaactcctgttttacaactattaataaattttacttcatctaattcatagttagccgggcgggatgcgtcaatgtctttatttctattaatatgataaatatcaaacaatgtttaatgtcattatggcgaatgcttctattctattttttagccgggtgatatttttcatttctgctggatgagcgtcgtcgccagaaggccacgtgagcacaagataagagaacgaaaaatcagcagcctatgcagcgacaaatattgatagcctgaatcagtattgatctgctggcaagaacagactactgtatataaaaacagtataacttcaggcagattattatgttgtttatcaagcctgcggatctccgcgaaattgtgacttttccgctatttagcgatcttgttcagtgtggctttcctagtccggcagcagattacgttgaacagcgcatcgatctgaatcaactgttgatccagcatcccagcgcgacttacttcgtcaaagcaagtggtgattctatgattgatggtggaattagtgacggtgatttactgattgtcgatagcgctattaccgccagccatggtgatattgtcatcgctgctgttgacggcgagtttacggtgaaaaaattgcaactacgcccgacggtacagcttattcccatgaacagcgcgtacagccccattaccatcagtagtgaagatacgctggatgtctttggtgtggtgatccacgtcgttaaggcgatgcgctgatgtttgccctctgtgatgtaaacgcgttttatgccagctgtgagacggtgtttcgccctgatttatggggtaaaccggtggttgtgctaagcaataatgacggttgcgttatcgcccgaaacgctgaggcaaaggcgcttggcgttaaaatgggcgatccctggttcaaacaaaaagatctgtttcgtcgctgtggcgtggtttgctttagcagcaattatgagctttacgcagacatgagcaatcgggtgatgagcacgctggaagagctaagcccccgcgtcgagatttacagtattgatgaggcattctgcgatctgacaggtgtgcgtaattgtcgcgatctgactgattttggcagagaaattcgcgcaacggtgctacaacgtacccatcttactgttggtgtggggatcgcccagaccaaaacgctggctaagcttgccaatcatgcggcaaaaaaatggcagcggcagacgggtggggtggtggatttaagtaatctggaacgccagcgtaaattaatgtctgctctccccgtggatgacgtctgggggattggacggcggatcagcaaaaaactggacgcgatggggatcaaaaccgttctcgatttggcggatacagatatccggtttatccgtaaacattttaatgtcgtgctcgaaagaacggtgcgtgaactgcgcggcgaaccctgtttgcaactggaagagtttgcaccgacgaagcaggaaattatctgttcccgcagctttggtgaacgcatcacggattatccgagcatgcggcaggccatttgtagttacgctgcccgggcggcggaaaaacttcgcagcgagcatcaatattgtcggtttatctccacgtttattaagacgagtccatttgcgctcaatgaaccttattacggcaatagcgcgagcgtaaaactgctgacgcccactcaggacagcagggatatcattaacgctgctacgcgatctctggatgccatctggcaagcgggccatcgttaccaaaaagcgggcgtgatgctgggggatttcttcagtcagggagtcgcgcagctcaatttattcgatgacaacgcaccgcgccccgggagtgagcaattgatgacggtaatggatacactgaatgctaaagagggcagaggaacactctattttgccgggcaggggatccagcaacaatggcagatgaagcgagccatgcttagtccacgttatacaacgcgaagttctgatttactgagggtcaaataaatatagcggcaggaaaaaagcgctcccgcaggagcgccgaatggattagcgaccgaacagatcacgttttttcgctttaaacggctgggaaatcaccaccagcactgcgacaatcaggtaagcgataaaaataccgagcagccactgcggcatttccagacctaaaaaatcccactgacgctcggcgcaatcgccagaggcgacaaacacttgcggcacccacttatccagcggcagccattccgggaaacgaaccataaaatcacaggtggcaaacgggctaggatagagctgaagcatggtgtgctcgtaagttaactgcacaccgcggaacgcactatacaaccagataaccatcgctacataacgcagcggagttttcggggcgatcgcgccaatcagcgcagcacccagaacgccgaataacgcgcagcgttcataaatacagagcacgcaaggtttcagtaacatcacatgctggaaccacagcgccgtcagttccagtgccagagcagtaaacgccatcaacagccacgcgccccggccttgactacattggttcaaaaatcgcaacataatcatttccctgcaatatgcatagagtgcgcagtttaaaccaattcattcgctgcgccaccaggaggcagcaaaaataggacgcaattggacaattatcgggcgaaaaggcaaaccgggcatttatatgcccggtaagttgttatcaaagcgttgctatccagcccatttgcataaaccattcggttacaggggcaagcgtaaactcgacgcagagcaagccgacgagtgtcaggacgagggtgtaaggcagggccatccacaccatgcggccataagagaggcgaatcaatggcgcgagtgcagaggtcagcaggaacaggaacgcagcctgaccgttcggcgtagcgacggagggcagattggtaccggtattaatggcgaccgccagcagctcgtattgcttcaacgtgatagcgccactttccattgccgctttcgcttcgttgatataaatcgtccccacgaagacgttatcgctaatggaactcagcagaccgttgaaaatatagaacaggctcagctgagcatgttcgcttgcctgcaacacaaactgaataattgggctaaacagttgttggtcgataatcaccgcgactacgctgaaaaacaccgtcaacagtgcggtgaatggcagagattcggtgaaggctttaccgatagcatgctcatcggtgacaccggtcaaacttgttgccagaataatgacactcaaaccaatcaagccaacttccgccagatgcaacgccagcgcagtcaccagccagacgccaataatcgcctggacaatcagacggattttatcctgacgggtacgctggtggcggctttgatcgtcaaactgttgcaacacttcgcggactttctccggcagcgtttcaccgtagccaaaccaacgcagcttctctaccagcaggcaggttaacaggccacaaatcagaaccggaacggtcaccgggctcatgcgcaggaagaaatcgccaaaatgccagccagccgctttagcgatgatcaggttctgtggttcgcccaccatggtcattacgccgcctaatgcggtgccgacaccggcatgcatcatcaggctacgcagaaagccacggaactgttccagaaccactttgtaatgcttgtcgatatgactatcgtcttgcaggtcggtgtcttcggtacgggaagaggctacgcggtgataaataccataaaaaccgactgcaacgctgatcaccaccgccacgacggttaaggcatcgaggaacgcggagaggaacgcagccgccacgcaaaaagagaggctcagcagcattttggagcgaatgcttaacagcaaacgggtaaatatgaacagcaacagctgtttcataaaatagatacccgccaccataaacatcagtaacagcaagacttcaagatttgccgccacctcttcacggacgtgttccgcgctggtcatgccgatgaataccgcttcgatagccaacagaccaccggggagcagcgggtagcatttcagggccatcgccagagtgaaaataaattccgctaccagcaaccagcccgcgacgaaagggctgatgaggaaaattaacgggtttacgattaagaaaatgatgagggcgagtttgtaccagtcgggggactggcccaaaaaattgcgccatagcgcgcggccccaggagatctccatgatggtttcccttaccttacaaataatcaatgatgtttttatgtttaaacgcaaagcttaacggtcaggcaggagtgaggcaagtcttgatagtcaaggggaaagagatgcggaaaatgaagccttgatccctttttcttctttttgtctgctatcagcgtagttagccctctggtatgatgagtccaactttgttttgctgtgttatggaaatctcactatggtcattaaggcgcaaagcccggcgggtttcgcggaagagtacattattgaaagtatctggaataaccgcttccctcccgggactattttgcccgcagaacgtgaacttagtgaattaattggcgtaacgcgtactacgttacgtgaagtgttacagcgtctggcacgagatggctggttgaccattcaacatggcaagccgacgaaggtgaataatttctgggaaacttccggtttaaatatccttgaaacactggcgcgactggatcacgaaagtgtgccgcagcttattgataatttgctgagcgtgcgtaccaatatttccactatttttattcgcaccgcgtttcgtcagcatcccgataaagcgcaggaagtgctggctaccgctaatgaagtggccgatcacgccgatgcctttgccgagctggattacaacatattccgcggcctggcgtttgcttccggcaacccgatttacggtctgattcttaacgggatgaaagggctgtatacgcgtattggtcgtcactatttcgccaatccggaagcgcgcagtctggcgctgggcttctaccacaaactgagcgcgttgtgcagtgaaggcgcgcacgatcaggtgtacgaaacagtgcgtcgctatgggcatgagagtggcgagatttggcaccggatgcagaaaaatctgccgggtgatttagccattcaggggcgataatcccttccgtttaaagagcaaacccctcaaacgaggggttttttgttgtttttacagatttcccattcttggcgggcaacgttccagcaactcgatgctgccgtcttcgttttgctgttcgagcatcacatcaaatccccacaggcgatgcacatgcttcaggacttctttgcgcccccgatccagcggtgcgcgattatgtggaatataacgcagcgtcaggctacggtcgccgcgcaaatccacgttccagatctgaatattcggctccagattacttaagttatattggctgcttaaccggttacggatctcccgataaccttcttcattatgaatagcggaaatctccagataattatgccgatcgtcatccagcacggtgaagaagcggaaatcacgcatcactttcggactcaggaactggctgataaaactctcatctttgaaatcacgcatcgcgaaatgcagcgtttccagccagtcggaaccggcgatatccgggaaccagtatttgtcttcttccgttgggctctgacaaatccgtttaatatcctggaacatggcgaacccgagggcatacgggttgatgccgctgtaccacgggctgttataggggggctggaagaccacattggtgtggctgtgcaaaaactccagcataaaacgttccgttactttcccttcatcatacagatggttaaggatggtgtagtgccagaaggtcgcccagccttcgttcatcacctgagtctgtttttgcggataaaaatactggctcaccttacgcacaatacgcaggatttcacgctgccaactttccagcagtggcgcatttttctccataaaatagagcaggttttcttgtggttcggacggatagcggcgcgcttcagcaaccgttttctcttcctcgcgcttcggcagggtacgccagagcatattgacctgactttgcagatactcttcgcgacttttctgccgggctttctcttcttgcaggctgattttttgcgggcgtttgtaccggtccacgccgtagttcatcagcgcgtggcagctgtccagaagccgttctacttcatcaacgccataacgctcttcgcactcggtaatatatttacgggcaaaaatcagataatcgacaatgctactggcgtcggtccagctacggaataagtaattgtttttgaagaaagagttatgcccatagcaggcatgagccatcaccagcgcttgcatggtaatggtgttctcttccatcaggtaagcgatacacgggttagagttaatgacgatttcataggccagtccttgctgaccgtgcttatacagccgttcagtctcgataaactttttaccgaaactccagtgcggatagttaattggcatgccgacgctggagtaggcatccatcatctgttcactggttatcacttcaatctggtgcgggtaggtatccagccggtagagtttcgccacccggtctatctctgccagataaacatccagcaggtcgaacgtccagtcgggtccatcgctcaaacgtgtggtgtccttattcatagaatcgatcgtcgccatacgcgcacctcattgttgtcggcgctctctgtgtggagcacctcatttcaagcatagaacacctgttaaaaaccgcgtcgccggagaatttttttctttgcgatttcttattatcagagtgccactaatccgcttctgaacggaattttatgctggataaaaagggcgttcagcaggagatactaaagacgccatattgccgcagagtcagggagatgtgagccagctcaccataaaaaagccgcatgttgaataatattttcaactgagttatcaagatgtgattagattattattcttttactgtatctaccgttatcggagtggctatgcgagttgtcatactgggaagtggtgtggtaggcgttgccagcgcctggtacttaaatcaggcaggacatgaggtcaccgtcattgatcgggagccgggggccgccctggaaaccagtgccgcgaatgccgggcaaatctcccccggatatgctgcaccgtgggcggcaccaggtgtgcctttaaaagcgattaaatggatgttccagcgccatgcgccgctggcggttcgtctcgacggtacgcagttccagttgaaatggatgtggcaaatgttacgtaactgcgacaccagccactacatggaaaacaaagggcggatggtgcgtctggcggaatacagccgtgattgcctgaaagcattgcgcgccgaaaccaatattcagtatgaagggcgtcagggtgggacgctgcaactgttccgtaccgaacaacagtatgaaaatgcgacccgcgatatcgccgtgctggaagatgccggcgtaccgtatcagctgctggaatccagccgcctggcggaagtggagcccgcgctggcagaagtggcgcacaaactgacgggcggcctgcagttacccaatgatgaaaccggagactgtcagctatttacccagaatctggcgcggatggcggagcaggcgggggttaaattccgctttaatacgcccgttgaccaactgctttgcgacggcgagcaaatctacggcgtgaagtgtggcgatgaagtgattaaggccgatgcgtatgtgatggcgtttggttcttacagcacggcgatgctcaaaggcattgttgatattccggtgtatccgctgaaaggctacagcctgaccattccaattgcgcaggaagatggtgcgccggtatccaccattcttgatgaaacctacaaaatcgccattacccgtttcgataaccgcattcgtgttggcggaatggcggagattgttggttttaataccgagctgttgcaaccgcgtcgtgaaacgctggagatggtggttcgcgatctctatccacgcggcggtcatgtcgagcaggcgactttctggactggtctgcgcccgatgacgccagacggcacgccggttgtcgggcgtacacgctttaaaaatctgtggctgaataccggtcacggcacgctcggctggacgatggcttgcggttccggtcagttgttaagcgatctgctctctggtcgcacgccagcgatcccatatgaggatctaagcgtagcgcgctacagccgtggatttacgccaagtcgtccgggccatttacatggcgcacacagctaaggaaacgagatgacccgtccgatacaggccagcctcgatctgcaggcattaaaacagaatctgtccattgtccgccaggccgcgacgcacgcgcgcgtctggagcgtggtaaaagcgaacgcttacgggcatggtattgagcgtatctggagcgcgatcggggccaccgatggctttgcattgcttaacctggaagaggcaataacgttacgtgagcgcggctggaaaggaccgatcctgatgctggaaggatttttccatgctcaggatctggagatttatgaccagcaccgcctgaccacctgcgtacacagcaactggcagctcaaagcactgcaaaatgcgcggctaaaagcaccgttggatatttatcttaaagtgaacagtgggatgaatcggttgggcttccagcccgatcgcgtgcttaccgtctggcagcagttgcgggcaatggcgaatgttggcgaaatgaccctgatgagccattttgccgaagcggaacatcctgatggaatttccggcgcgatggcgcgtattgagcaggcggcggaggggctggagtgtcggcgtagcttgtccaatagcgcggcgactctgtggcacccggaagcgcattttgactgggttcggcctggcattattttgtatggcgctagcccgtccggtcagtggcgtgatatcgccaataccggattacgtccggtgatgacgctaagcagtgagattattggtgtccagacgctaaaagcgggcgagcgtgtgggctacggcggtcgctatactgcgcgcgatgaacagcgaatcggcattgtcgccgcagggtacgccgacggttatccgcgccacgcgcctaccggtacccctgttttagtggacggcgtgcgcaccatgacggtggggaccgtcagcatggatatgctagcggtcgatttaacgccttgcccgcaggcgggtattggtacgccggttgagctgtggggcaaggagatcaaaattgatgatgtcgccgccgctgccggaacggtgggctatgagttgatgtgcgcgctggcgctacgcgtcccggttgtgacggtgtaacttgttgtaagccggatcggaggcaacgtcttctgggtgcaaaaaaatcatccatccggctggtcagcaactgtagttgttaatgtgacagagccattgcccatgatagtgtccattaaaaggatggacactatttccccggaacctgaactcaccgcacaggcgttctacataaaacgcttacgcttcattgttgactcgaactcgacttcagataaatcacgctttacccttgatggagcctgtacatagatttgtgtaattgcctgattttgatatgttcaattcaacatcaaatgaaggttaaattatggacgacaaacaattgcaggctcaggctgcgttcagcaaagcatcgcaaccggcgatagatgcttcattaaatttaagattcagcttcctcttcagccacccgtacgccaatcttcaacacttcattatcttctttctcggccaccgtccagatcatcccggcaaactctacctggtcaccgacaaccggtgccgcgcctaacaactgctggacaatttcacccagcgtttgctgcttatcacgatattctcgcccgtcttccaggccatatatcagcgcaacatcagcatatttggcgctggcttcgagaatgaagtcaccaaagaagcgttgatccagcgcgaccggcgggctctggctgaacagtttaccgagcgccggaagatcgcgttcccgaccaattacacacaacacatcgccttcgcgcagtcgggtgctgccggtaggatgaagcaactggttatcacgaaacagtgccgcaatacgcgtctcttttggcatatgcaaatcgcgcagtgccgcgcccacgcaccatttatcggcactcaattgataaacaaactgctcccacggattttccggatgaatatccaggccaacgcgactcaccggacgtcccactggcggaaccaccactttggcttttttagccgcccagctgagacttgttccctgcaagagcagactaaccagaaccacaaagaaggcgacattaaagaacagacgtgcattctccagccccgccatcatcgggaacacggccaggatgattggcaccgcgccgcgtaatcctacccagctgataaacacgcgctcacgcagattgaaaccgcggaaggggagcaatccagcaaatacgctaaggggacgggcgaagaatatcatccatgcggacaaaatgagcgccggaatggcaataggcagcagatcgcttgggttaaccaacagccccagcaccaggaacatggcgatttgcgccagccaggcgaggccgtcgaaattttgcaggatgccgtagcggttgcgaatagggcgattacccagcagaaaaccgcacagatacaccgccagaataccgctaccttccagcgcagtagttaaactgaaaatcagaataccgccacttaatgccagcaatggatataatccggcgggcagggcgatgcggttgatcatttgcagtagtaaataaccgccgccaagacctattacaatgcccagaccaaattgttgcagaatatcgacaatgaacatccagctaatattgctctcatgatgctggatcatcgcaattagggtaatcgtcagaaagaccgccattggatcattactgccggattcaatttccagcgtgctgccaacacgttcgttaagccccttaccacccagcagagaaaagaccgctgcagcatcggtagagccgacgatagcgccgattaataagccttcaatcaaatcaagattaaacagccacgccgccatcatgccggttaaaccagaggtgataagcacgcccagcgtcgccaggctcagtgccggtcctaacgccacacgaaaggaactggcctgagtgcgcatcccgccgtcgagcaaaataatcgccagtgccaggttacttaccatgtaggcgaaggggtaattatcaaacgggataccgccgacgccatcgactcctgccagcatgccgatcgccagaaaaataaccagaataggaatgccaagacgggaagaaaaactactaagtaatatactgctggtgacaaggatggatcctaagatgaaaaggctaattattgttgtggcatccaacggtcggttactcctgattacgctgtctcttatataaaccctaccatattagcggcagagacagcgttttacttagccctgaagcgtgatttttttacattttaagaacaggatgaccgctaatcgtcaactgagtgccttcccgggtgttattcagaatggcatgtgcgcccaacggcagcgtaaccgtgcgttgttcatgaccaaaatcgaggccggtaatgagtggaatgctcaggcgggaacgcaaaaacgcgtacacactctccaggttgtaacctgcgtcataatcattgggcgtgctgccgctaaagctaccgagaataatcgccttctgacgtggcaaaattcccgcatgatagagctgcaacagcatacgttcgacccggaaagggtgctcgttaatatcttccagcaccagaataccgttctcaatttttggcatccacggtgtaccgatcagactaatcagcatcgcaagattgcctccccacaacgtgccttcggcccgacatgtcgggccttccccttgccattcaatggtgaaggtttcattgcgtaacgccagccagaaatggtgctcggtaaaggcgttcagttcatccgcgccaaagtttgctaccagcatggggccgctaaaggtgatgacattgccatgcgccagaagaccgcactgaatggcggtaaaatcgctatgtccgcaaatgagcaacgggtcatgttgttggcgagccaccagtgcctgccagtcaatatctgccagtaaacgactggcaccgtaaccgccgcgtacagccagcacgatggtgttgggggtagtcagtctggcaagggaattgagatcttccagacgctctgtttccgtacccgcaaaacgctcacaacgacgggcaataacctcgacgttattgacttgatgccccgcgtcggtaaggcgctggataccacgcagcgcggcgtgctgtttaatgcagtaaccgcttggggcaattaagtgaaacagagacatggcaattccttgctgacaacagaaacgaaatgtatatcatgccgcttaggtgtgccgttgtcacctcaacggcgattccaggctataaggatagaagaagtgaaattgagatggtttgcctttttgattgtgttattagcgggttgtagtagtaagcatgactatacgaacccgccgtggaacgcgaaagttccggtgcaacgtgcgatgcagtggatgccaataagccagaaagccggtgcagcctggggcgtcgatccacaattgatcacggcgattatcgctatcgaaagcggtggtaatccgaacgcggtgagtaaaagcaatgccattggtttgatgcagttaaaagctagtacctccggacgtgatgtttatcgccgtatgggctggagtggtgagccgacgaccagcgagctgaaaaatccagagcgtaatattagtatgggggcggcttacctgaatattctggaaaccggcccgctggcaggcattgaagatccgaaggtactgcaatatgcgctggtggtgagttacgctaacggggcaggtgcgctgctacggactttcagcagtgatcggaaaaaggcgatcagcaaaatcaacgatttggatgctgacgagttcctcgaacacgtagcgcgaaatcaccctgcgccgcaggctccgcgctatatctacaaacttgagcaggcactggacgcgatgtaaatcagtcgcgcactttgtccgctttttcccgggcttctcgctcgagagagaaaataatccgctgtaattgccgctccaccgtcgggctgacgttaagaaaacggaagctcagacggggagtggtgatggtttcattcttgccatcaatcactttgcgctcgctgatggagattaactgggcgtcaaagtgaaaaacaccccattgccccatgttgacttcaatctgagcgaagcgcatgccttcttgtaattcggcaggctttgctgtttccagtaatgcgcccatgccgcctaagctcaaatcatacaggcggaaacgtaacgtactgttatccgccagtttggtctggcaaaaataaggcggatggagtggggcggagatgcggaaatatcggcgtcgttgtacaaaccataaggtgggaggcggtacggtaataaatgccggaagctgcaagtattcactctgctgtagttgttcaacagtaaactcgactttcgcaccctgagtttcggcggtaatggtaatgtgctgtgcctttagcacggcgatgttgtcttcggcttgactgccgaaatccagcaccagtttatccggggttattgccagtaatttgctgatcagctgcccgccattccaactgagacgcaaaggaattgcggctttgtgcaaatcgcgtaacacgcccaggacggctaacggattttgtttcaggaactgctcatggtaatgactcacgcggaaaaactcctgactgacaaactgtctttggtttatcggtcacagttaacaaaacttaatacaaatgcgtgaatattttttacatgttgttcttaaatcagccgacatacgcccagcatcgatcccgcccttgcctatacttagagcgttgatgtaagcatttcttgcgtccgattcatcgaaacgagggcctgaacatgggaattattgcctggattatttttgacctgatagccggcattatcgccaagctaatcatgccggggcgtgatggtggtggatttttcctgacctgtattctcgggatagtcggtgcggtggtcggcggctggctggcgaccatgtttggcattggcggctccatcagtggttttaatctgcacagcttcctggtggcggtggtgggagctattctcgttctgggcatattccgcctcctgcgaagagaataagattttcataaggcggatagcgatacagatgccgctatccgctttcacatcagaacgtatactcgacacctgctttacgggtgaaaaaaatcaatatagcacttcgatatccgataaagtcggttcccggtaacaacaacagaatccttttttaattattgtttcgttgtttttggtgtgattcagaaaataaatattttagacagtagccagagtggcgttaaaaatggggcggatagtgaggcggttttggctgcgcttattgaacatttagaattgatcaatccttctggcagattaagccaaaatacccgtagcgcaatgcttcagttacgcgaagaggaatggtctgaattctttttttggttgctaaattctctggagtgtctggattatgtgattattaatttaactccagaaagcaaaaaaacgttgatgagtgaacaccgtaacaatattcaggtagcaattgatgctttatatagccaacgtcggcgtaaaagcccgggtgatgaaagtgaaacacttacccgtagaaatgacgctatcttcggcaaccacgtatggcaaacatttgcgcaatacttcccgccaggacttgaaaaaccgtctgtgtaaaaaaaaccatagctatggtgttatctgccgacaacgccatccggagaagccgaatgacgttgtcggagtaagcgctggttaaggtgtgggttgtgcctctttggtactgggttgcgtcgttgcactcttaacggtcggacgcgtcgccggaacattgtcacacggttgctctttcgggcagatcaaatccagcattttcagcgtcacgccattggtccagccaaagccatcctgtaatggatattcgccaccgccgccccccgttccggtggtgctgacatcatatttttccaccagctttttctcccggtcataggtgtgctgaacattggtcaggaagtgccagctaatgtccatcgccacctctttttgcccgtagttttgtaatccttctgtcgcgacccactgtaacggtgcccagccatttggcgcatcccattgttgcccacttttcacgctcgtggtgttcaggccgccgggttgcagcagatgtgttttcgtcgccgtcgccattttgttggcgcgatctttcgctgccgcattgacgtacagcgggaacagggcggccgcggttaactgattgcgcactttatgacttttcaggtcgtaatcggcataccagccttgttgatcgttccacaggtatttttcgatccctttttgacgggcatttgccagcgtttcgtactggtttgccatcgcgttatctccggcagctttgctggcgcgggcgaggattttttccattttaaacatcaggctgttcagatcgaccggtacgatgctggtggtgcgtaaggtatttaactgctgcgggttgtccatccagcggctgctgaaatcccagccagacgcagcggcagagcgcaggtcgcggtaaatttcagtggcaggtcgattcggattgcttttggcggtggcaatatcttccacccaactctctggtcgtggcgtatcgcgatcgtcccagtagcggttgagaagggtaccatcctgaagtttgacaacgcgtttttcctgttgtccggcttgcaggttttcaacaccgtccatccagtaagcatattctttttgcatttgcggcaggtattgcttcaacgcggcatcgccttcatgctgcgccagtaactctaccatcagggcaaagaagggcggttggctgcggcttaaatagtaactgcggttgccgttgggaatatgaccgtaagtgtctatttcatgagcaaaattggccaccatatccgcgactttatcccagtgaccgctttcggcaagtcctaacatggtgaagtaactgtcccagtaatatacctcgcgaaagcgtccgcccggcacgacataaggttccggcagcggtaacagagaatcccatttttcggtgttttcggtagaacgcgttaataccggccaaagtccgtcaatatgttcgcgcagactctgcccctctggcggaacatatttctcgccttctttcggcagggtgaaattgacgttaacgaaatggcgcagatcaaatccgctctggttttgctgcatccgataatcagcaaggatcatcagcggatcgctgttcggcacggcatcggcaaaggttttttggtccggaaaaagtttggcgttttgcacatcattaaacagcggccctaataaaatatcaggcggctgtggtgttaccggtgtttcttctgcctgcacgcttagcgcagcgaaacacaaaaagatacaggctggaattaacgccattttttgcgggcgagaaggtgcgggggatttcatcaatcattctcctttggcgaaaccgaataaaacggtattcaagtatcagaaaaccttagttcaggatcgcactagctgcatgatcgaaatctcattctgcgaactgtcaggcattttagaaaagggaattaaagggataaataacggcgaaatagagtgatcaaataacgtctgtttattagccagccagcggcgttgggttcgtgattagcgaagaaaaatcatcataaattggtgaaaaatataacaggtagttaaaaaccattagtgctgagtaaattgccggatgacatcagaacgatgccatccgaacagtggcttaaccctgacggttgaaacgttgcgttttaacgtccagcgttagcgtttcttctggttgtatcgcatacagtttctcaccctgctggcaaatccagccaatccccagttcacgggcgattagggcgctgtgggataccggacttccggcgctaaggcagataccttttacaaccgccggatccagttgcagtactgtggaaggataaatgttctccgccagtagaatagttgggctgttaaactgcgggagttcttctttcgtttgggtcaggtggaccagggtgcgatgcagaagatcgtccacatcaatatagcgagcttgtagatattcatcatccagttgctggtattgctggctaagttctttaagaacttgctgccaggcatattctgccgtgcaatgttcatgctgaaggagttcgcttgccgccgccagcagttccggatcatctaacagtgtatggtgaccagaaaagattgcggcaatatcgtcaagcccgctggcttctgctttcgctgttaacgtcatcagatctaataacgtgaagtcaatagcctggcgtaatcgatcttgttcttcttccacggtcagggtactttttgcctgtaccgtacataaaactggttgataataaaaggctttaccgctaacaggcggaacgggacgcagagtaggtggagcgacttcctccgtttcaccaaagttatcttcagccagctgacggaaagcgatcagtgcctcttcagcttctggccctttcgcaatcaggcgcagcgtatcgttatagcgaacttgtagtaacgcaatctggttaatactctctggtgtgacgcatttgccgtttttttccagcaacatatcggcattaaatgtgcttaaggtataaaccagccgggaggccggacgtacatgcaggccgttacggttttttatgaccaccgccagagaacgggcttcttcatcgtacgcaggacatgtgtcagagatttcagtgtcggaggacggtaaacccagttgttcacgtttggcttccagcgcatgcatggcgtcaaagataactttgtcgatatccgccccgctggccgcgctgaccgttgctgccagtgtaccttcgaccaacggcgcagcacacaaacgtacttttgcggcgatctcgggagccagcaattccagcgcagtttcagcactcaataatgcgctacccatatccatcatgaccagcacatggtcggcatcagcaacagattcgatggcctccatcactttgacggcatcggtaccaatgggattttgtggatcgtcaattcccgcggcaatggcgattttacaactatcactcattaacatctgacgggctaattcaccgacaccttctcccagtcggctgctatgactaactatgaccaggtttaccatcaccaattccttactcttttgcggctaacgccaacatttgcatcataaacatcacgctggtcgcgccgggatcctggtgaccaatactgcgttcaccgagataactggcgcggcctttgcgggcttgcatcgtaatcgtactttgtgcagcggattcggcgatgctactggcagcttcgagcgccaccggaacagagagattttgctcgctggactgacgtaagctttccaccaccggcacccacacatcacacatggttttatcgccaggttcggctttcccgcgactgattacgccgtccgcgccatcgcggaacatctgataaagctcttccagtgtcaggctttgccgtgcctgggtcgcctgtgcggcgcggataaagaaggtaccgaacagcggaccactggcaccaccgacgctggaaagcagcgtcataccggtattcttgagaatgaaaccgatatctttatctgcgatagcagggagtttttccaccactttgctaaagcctcggttcatatttagcccgtggtcagcatcgccaatttcgcgatccagtccggtaagatactcgctctcggtgctgaaaatatcgccacaacgagtgagccagttaacaatttgagttctgctcagactcattgctttctccttatttaccccagttaagggccggggtgtggaccggggcgtcccagagtgccagcgtttcgtcatcaactttcagtaaggtgatactgaaaccggtcatatccagactggtgcagtacgcgccaattaaattacgttcgatagtcaatcccgcttgctggcaacgtgtggtcaggcggttatagacgccgtacagctcagaaagcggagttgcgccaagattgttaaccagcgcaatcacccgatcgccagactggagcggttgtttggtttgttgttcttcctgccaactgccttgttgataatcccagaaacgcaaagtgcgatggtaactgccatttaccagcagggtgtcgaacatttcatcgacggtttgatcaagggaagagaaggggcggcggtcaatacccggctcaccatgaatgccgacgccaaactccatctcattatccgccagggtaaaagaaggtttgcccgcggcaggaacggtacaggcaccgagagcgatacctatactgtggccttgattattcagcttacgccccagttccgcacaggcgtccagactgtcgccacgctccgccgctgcgcctacgagtttttcaattaatacggtgttggcaacgccgcgtcgcccggcagtataaagactgtcttttaccgcaacgtcgtcatcaatgaccacagtggtcacttttacgccgctatcgtgcagtaactcggtcgctgtttcaaagttaagaatatcgccggtgtaatttttgataatcaacagtacaccttcgccgccatcaacttgcatggcgcattcaaagattttatcgggcgtcggactggtgaaaatttcgcccggacaggccccgctaagcatcccctgaccgatataaccacagtgcatcggctcgtgtccgctgccgccaccgctcagcagggcgacttttcctgcaacaggggcatcagctcgggtgacatacaccggatcctgatgcagtgtcaggcttggatgcgctttcgccagtcctgccagttgttcgtccagtacgtcttgcacatcattgatcaattttttcattattttgctccagcaattacggtagggcatggatgatgttcaacgacacggcgaccactgactgccgatgaatccattgtgcatcaggcaagggaaaagaaaattagcccaaattatgtttcatagtgaaacatatgctttaatgaatgttccatattgaaacttttacgtgtattaatacttaaaattgcgagccggaacaccttttgtcataagggatgcgggatatgagtggcgcttttaacaacgatggtcggggcatatctcccttaattgcaacctcctgggagcgatgcaataagctgatgaaacgggagacatggaacgtaccacatcaggcccagggcgtgacatttgcttctatttatcggcgtaagaaagcgatgctgacgctcgggcaggctgcgctggaagatgcctgggaatatatggcaccgcgagagtgtgcgctgtttatcctcgatgaaaccgcctgcattctcagccgtaatggcgatccgcaaaccttgcagcagctaagtgcactgggattcaatgacggcacgtattgcgccgagggaattattggtacttgtgcgctaagcttagcggctatctctggtcaggccgtgaaaacgatggccgatcaacatttcaaacaggtactctggaactgggccttttgtgcaacgccgttgtttgacagcaagggccgattgacgggaacaatagcgctggcgtgtccggttgagcaaactaccgcagctgatttgccgttgacgttggcaatcgcccgcgaggtcggaaatttactgctgacggacagtttgctcgctgaaactaaccgtcatttaaatcaacttaatgccctgttagaaagtatggatgatggcgtgattagctgggacgagcagggtaatttgcaatttattaatgcccaggcggcgcgggtcttgcgccttgacgcgacggcaagtcagggacgggcaatcactgaactcttaacgttacccgccgtattgcaacaagcaataaaacaggcacatccgctcaaacacgtagaagcaacctttgaaagccagcaccagtttattgatgcggtgataacccttaaaccgataatagaaacgcagggaaccagctttattttgttgctccatcctgtggaacagatgcggcagttgatgaccagtcaattaggaaaagtcagccataccttcgctcatatgccacaggacgatccgcaaacccgccgcttgattcattttggtcgccaggcggcgcgcagtagctttcctgtcctgctttgtggagaagagggcgtgggcaaggcactgctaagtcaggcaattcataatgaaagcgagcgtgctgcaggtccttatatcgccgtcaattgtgagttatatggtgatgctgcgctggcggaagaatttattggtggcgatcgcacggacaatgaaaatggccgtctgagtcggctggaactggcacacggcggcacgctgtttcttgaaaagattgaatatctggcggtggagttacagtctgctttgcttcaggttatcaagcagggggttatcacgcgactggatgcgcggcgtttaataccaattgatgtcaaagtgattgcaacaacgaccgcggacctcgcaatgctggtggaacaaaatcgttttagtcgccagctgtattacgcgctgcatgcatttgaaattaccatcccgcctctgcgtatgcggcgtggcagcattccggcgctggtgaataacaaattacgcagtcttgaaaaacgcttctctacgcggctgaaaattgatgacgatgccctcgctcgcctggtttcttgtgcatggccaggcaacgattttgaactttacagcgtcatcgagaatcttgctctgagtagtgataacgggcgcattcgcgtcagtgatttgccggaacatctgtttaccgagcaggcgacagatgatgtcagcgccacccgcctttccaccagtctgagttttgcggaagttgaaaaagaggcaattattaacgcagcccaggtcacaggcggtcgcattcaggaaatgagcgctttacttgggatcggccgcactacgctgtggcggaaaatgaagcaacatggcattgatgcagggcagtttaagcgccgggtatgaaagacagaaacgatttctgatacatcagagtgatctgtatttcattccggcgcacgctaacaattttcagcatcgtttaagggcttgtctatcccgcacttaaaagctgaagcgatatcctccgttgacttgcttctgatcaaagaggttaccctgcgtgtaatccgcttcgagatagaatgtgtgctgtttgttatactgtgcactgactcccacgccgttattccagccattacctttgaaactgtacttctcccgggagttgttcaacagatattcggtatccccactaaactcgcggatagcgccagtcttcacatagacattcagctggctgttgcctgcggtgatgtcataccccagtatcatgctggcacgccccagcaggctttcgtagtgattcagatgtatattgaggccattactcgccttcatagtcatctcattctggtggctgtatgtaagctgggtttgcggctctatatagaacccataaccagtaggggacaggttgaacctctgcccggcttccagggagatgctcattccattcgcagtgccgttggcgttaacgccgttgttctgactgtccagtacgtggaaactatttttctggcggcttgcttttataacgagatcgctgtaaaaaccgttttgtgccatgtaactggcgtacattcccatgtagtcactacgtgcggtaccgtcgcctccgctatagtccgggcttgcatgtgtactgccaatatacagaccgacatacaacggcattacatcagagagacgtttatccccaccaaactggataccgctgtaacccatgtcaaagccgctcagtttgccactggcaaaggagtccaggcttcccccataactgcgcaaccagatattaccgtctttactctgatttcgcaggtcacccatccgttgcatcagcgtacggttttcaacatagttcaataagtaaccgacattgagataattgccgccagcatctgcggtcgtggtgggtttaggcgtgggagcgggttcaggcgtaggatcggggttgactatgggaggctgagcgggagctggtgtgggttcaggattaggagtcggttccggaactgtcccggaagcgtaaagctcccagttagtgccatttttacgcacatcgtacagatatccccccaactcaacctgagaagacgcgctgaagctggccgcgccgtcagtggtttttaccactgtcagaacttcatttcccgttgtggcctcgctgccctggttgcggatagccaatacgtgattaccagcactactcccgctgatattcaataaatcccctttattattaacgccattaccctcgccaacaacatcagcacgcataataaaggtactgttaccgctcaggttctctacgtttaatgtggcaaatgtgccggcagtactcccgtggctggcaaaatcgacagtactatggctcagcgccagcgtgtcgagattagaattacttgttacgttccagacgctgttattcattgcaacgtccagttttccgccattgacattatcgctgagggaggaacctgtccaaacgttcccagggtgcatatccagattgattagcccacctttggaaagaacgctaccgttgataagcatacgaccgctggcgttgatgcggctggcggcataaccatcgtcatgttgcgttgcgatggccatctggtcgggtgtactcatatcaatgaccagatcgctcgtgaggtcgatctggctgttggtcatggcataaattcccctggctcctgccgcgccggtgatagccaaactgtctccggttattctaccgccgctgagagcccacaaacccagcgccagactgccattacgatcaactgtaatatcggtattttgcatgttgacaacagccgttgccgtctgggcgctggcaccataagaaccgccggaaaagatgctgtttcgttgcgctgccgtgccagtaaaattgattatcgcgtcactaccactggtgacgaggccaccgccctgcgcggaagaaatatggctatctgcaccgatagtggttgtaccaccacgaacttcgacgccattggccgcggctccagttacatcaacagtgagtgcattcgcgctaacctggccaaagctccagaggccgtgagcattatcgccattggttttaatggtactgtttgttccgagatcgacaacagagtttttctgtacgtttatccccatggcgctgtagccctgaacatcgattgtcaggtctgtagccgtaaaacgcgcagcaccattggcgttattgccgttgagaccaccgatataaacacctgtacttccatcggtcgtgattttacttccgcttccaagatcgacactggtgccatagtcattgatggttaggcctataccgttgctgttttcaatggtgaattgagtggctgttagtgtactgctatgcccaataatgatgccgtcatcgttactcttaatggtgctgcctgtgcctaagtcagcatgggtatagtcaccaattaagttaatgccgatggcagaggtttgaccaacaacatctactgtgagtcggttagctgtcagggagctgtttttgccctgaataatgattccttttgcatatccagaggcgtcgttgacattgacggtgacatcattacccaggttgatattgccaggcgtgtttcctgctggggtcattacaccatagaggtttccacttggatcggcggtatctcctgtaattctgtcaccatcattaatagtaatattggtgccatattgacttcctgtatcagcagctatcagcaggggggaaaagataattgcattcaaaccaatagcgccaaattttatcagttgaatactggggctacggatttttaattcagcgagacgatctgctttggtattcccattgtgttgtttgatgcccataccactcctatatagtacccagactatgggtctatggattttgtcattttgtttaaatcaatgaataatatcctcttatcatcatgatatttgtatggtgcaatcatgatgagcttctcagagaataattctctattaccgggcaaaatcaggaacacaggaattaatatatatttaacatcccccttacaaaggtgagtttatatcgagttattccctaagttgtcgttacttattccaattcgttactataaatatggcaaaaatattacaacaaacagcggttaaaaaatttggtgaagattttttgtaataatcctaattagttatgggaatttcgcttgatgtatctgcataacaaaaacaatatgcgccatttttgcattactaataagaaaaagcaaaaaacatcgatattcatttttggtcaatgggttttctggcctatcgttgttattgtgctactggttatcattttcatcttgccagcatattggagcgtgatcaattttgatcagctgtgaagggggctgatgtgtagtgatacaaaaacttacgttatatcactgctaatgagatatccggcatctgaacacttatgtctttaattattctcgtggttcactataggcaataagcacaaaagtgtaggatgttacaagaatgattaggactcggtgaaatgaaaaatccacgcaattgcgtggattttatatacttttgcgctcttcatgagatttagcgaaacctcatgagacaataaattaattagacgttgaaaaggaagttcatcacatcgccatctttcacgatgtaatctttaccttctgcacgcattttgcctgcttctttcgcgccttgttcacctttgtaagtgatgaaatcttcaaagctgatggtttgtgcacggataaagcctttttcaaaatcagtatggattttgcccgctgcctgcggcgcggttgctccaaccggaatggtccatgcacgcacttctttcaccccagcggtgaagtaagtttgcaggttcagcagtttataaccggcacggatcacacggttcaggcccggctcttccagcccaagctcctgcataaactcgtcacgttcttcgtcgtccagttcggcaatgtctgcttcaacagcagcacaaaccggaaccacaacagaaccttctttcgccgcgatttcacgcacctggtcaagatatgggttgttttcaaaaccgtcttcgttgacgttggcgatgtacattgttggtttcagcgtcaggaagctcaggtaacgaatagccgctttctcttcagcgcttaaatccagcgcgcgcagcatacctgcattttccaactggggcaggcatttttccaggaccgccagctcagctttcgcgtctttatcgccacctttggctttcttctgtacgcgatgaatcgcacgttcgcaggtgtcgaggtctgccagcgccagttcggtgttgataacttcaatatcgtcagccgggttaactttgccggaaacgtgaatgatgttgtcattttcaaagcagcgaacaacgtgaccgatcgcttcggtttcacggatgttggtcaggaactggttacccagaccttcgcctttgcttgcgccttttaccagaccggcgatatcgacaaattccatggtcgtgggaagcgtacgctgcggttttacgatttcagccagttgatccaggcgaggatcaggcattggtacgacgcctgtgttcggctcaatggtgcagaatggaaagttggccgcttcaataccggctttggtcagcgcgttgaacagggtagatttcccgacgttgggcaaaccgacgataccgcatttgaatcccatgatttaaatcaccttaatatcttaataatcaacctgttattgctaacagattgcagaaatggaaataactttgcctattatacacggcactcggcaaaaatgccgcagacaacgacttattgcgctttaaaggcgtgcaatcggttcgttgctttggtcaagccatctgtaaaccacatttcagtacaacgcgccgcttcgtcaatggcttcatcaattaacttctgttcactaacaggcggtttgcctaacacaaaaccgacaactttatttttatcgcccggatgaccgattccgatgcgtaaacggtgaaagttagggttattacccaatttactgatgatgtctttcagtccattgtgaccaccatggccaccgcccaatttaaatttggcgacgccaggaggcagatccagttcgtcgtgggccaccagaatttcgtccggattaatgcggaaaaaactggccatcgccgcaacggctttgccgctgagattcataaatgtagtcgggactaacaggcggacatcttcgcctccaagagtgactcggctagtataaccaaagaatttagcctcttcgcgcagcggagcgcgcaaacgctctgccagtaagtcaacgaaccaggtaccagcattatgtcgcgttgcggcgtattcagcaccggggttcgccaggccgacaatcaatttaatcgtcacgtttttttgtcctgagtgtgtacataactggcgcgtagtttactggttgcggccccgcttgacaaaaaactgcgtatcaaatgcagataacgtaataattgcctgagtggactattagaaagtcaaggtgttcaggcgtttatttgtaaagttttgttgaaataagggttgtaattgtgatcacgcccgcacataacccactgggtgttgtctatactttacacataaggaagaggggtattccctgttacaacccagaaagttccggaggtgacatatgaaacgcaaaaacgctagcttactcggtaacgtgctcatggggttgggtctggtggtaatggtggtcggcgtggggtatagtatcctcaaccagttaccacagtttaatatgccccagtatttcgcacatggtgcagtgctaagtattttcgtcggtgccattctctggctggcgggtgcccgtgttggcgggcatgaacaggtgtgcgaccgttactggtgggttcgccactatgacaaacgttgccgccgtagcgataatcgccgtcatagctaacaaataatgcagtttgctgaccagtcagtttgcgctgactggtcaatctcgtacttataaatccgccatcgccgcgcgacgattcgggaagaacgccaggcgtcccgggatcggttgaatgccagcgcgagccatagtgcgcagtggctggaattccacgttgcacacgcgcagttcacatccctcgggcagacgcttcacaaaacgctggaacgcatcaagaccaccagcatcaagtaccggaacggcatcccacttcagaatcacaatccgtttgccttcaagacgactctccaggtccgtgaataagccttcagcagcagcaaaaaacagcgggccaataacgcgcagaaccaggacatcgtctggaacatctacgactaccggtgccaggcgagtcatacgtgcgatacgacgcataaacagcaggcttgccagcacgatccccacgctgatggcaataaccatatcaaacaacacggtcaggctcatgcacagcagcatgacgatgatgtcatctttcggcgcatgacgcagcaagtcgaccactttgtgcgcttcactcatgttccacgccaccatcaacagcagggctgccatggcggaaagcggcagccaggagagcagcggtgccagtaccagcagggcaagaataaccagaatagagtggatcaccgcgctgataggggacgttgccccggcacggacgttagcggcagaacgcgcgatggcagctgtagcggtaataccaccaaagaacggagcgataatattccccagtccctgtccaaccagttcgctgttcgccttgtgtttcgtcccggtcataccatccagcaccacggcgcagagcagagattcgattgcgccgagcattgccatactgaatgccgcaggcagcagtgtgcgaatagaatcccaggttagcgtgaattcactattaggcagatcccacggcagcaccagttgcggcagcagttgcggaataccgttaccctgagaaccatcggccaggacgtagtggaattggctaccgatggtagcaacatgtccgccgagcaggttaacaatccccatcaccgcgcaaccagccagcaaggccggaaggtgaccgggtaaacgaatgcccagacgcggccaaaaaacaagaatacctagcgtcacaatgccaatggcagcatcacccacattaatggtcggcagcgccataaataatgcgccgactttttgtagataatgttccgggacatgggccatttgcagaccgagaaaatctttaatctgcatggtaccgatggtgatcccgataccgctggtgaaacctaaggtgacggaaaccggaatatactcaatcaggcgaccaaagcgtgccagacccatcagaatcaaaaagatcccgctcagcaaggtcgcaaccagcagtcctgccagtccaaactgttggctcacgggatagagaattaccacaaatgccgcagtcggaccggaaacgctaaagcgactcccacccgtcagagcaatgacaatccccgcaacagctgcggtatataaaccgtactggggtgccacaccactaccaatagccaacgccatcgccagcgggatagcaataatcccgacggttatcccggcaatcaggtcacgggtaaaccgtgcggcagtatatttttctttccagcaagcgtcgatcagagcgcggaaaggcatcacatgactggaaaatattttgttcacaataatgtttcatccgtgagcgcatcatctgtcaactaaatggcaggtgaaggaggcataggtcatacaaatggatattacagacaaaaaaacccgccgcagcgggtctttgagccgggttcgattagtgttcgaacatggcagagatgctttcttcgttgctgatacgacgaatcgcttcggccagcataccactcagggtcagagtacgcacgttcggcagacttttgatttcatcgctcagcggaatggtatcgcagacaacgacttcatcaattacagagttacgcaggttgttcgccgcgttgccagagaagatcgggtgagtcgcgtacgcaaatacacgtttagcaccacgttctttcagagcttcagcagctttacacagcgtaccgccagtgtcgatcatatcatcgaccagtacgcagtcacgacctgcaacgtcaccgatgatatgcatcacctgactaacgttcgcacgcggacgacgtttgtcgatgattgccatatcggtatcgttcagcagcttagcgatagcgcgggcacgcacaacgccgccgatgtccggagaaaccacaattgggttatccagattcagctgcagcatgtcttccagcaggatcgggctaccaaatacgttatcaaccggaacgtcgaagaaaccctgaatctgttcagcgtgcagatccactgtcagcacacggtcaacaccgacgctggagaggaagtctgcaaccactttcgcagtgattggtacacgagcggaacggacgcgacggtcctggcgcgcatagccaaagtaggggataacagcggtgatacgacctgcggaagcacgacgcagggcatcaaccataacgactaattccatcaggttgtcgttagtaggggcacaagtggactggatgatgaaaatatcaccaccgcgtacattttcattaatttgtacgctgacttcgccatcgctaaagcgacctacagcggcgtcgccgagactagtgtacaggcggttggcaatacgttgtgctagttccggggtggcgttaccagcaaaaagcttcatatcaggcacgagaagaacctcaggcatgcgtccattggtggaaagaatctgccgaaaactgtgcgggccaggcatgatcctttccaggcggtgtattaaagagcgcgatgcaacgtctggaacaaggtgacgttgtcaccgaaactcagcttgcccggcttaaagcatggctctgtgcaatggggaaagattagcgcctttcgccacaaagccattgagccattccggggcttgctctagcacctggcgggcttcagactctgtatcaaattcagcaaagacacaggcccctgtcccagtcaggcggctcggggcgtattctaacagccaggaaagcaccgcatcaacctcgcgaaaacgttttcttgcgataacctcgcaatcattgctgaattcacattttagcaacgtttctatactcctttttggcgtattgcgcgggagttcaggatctttaaaaatcaccggagtcggaatacttacaccagggtgcgccaccagataccacttctctggcggatccaccggcgttagtatttcaccaacgccttcggcaaacgcggcatgcccccgaacaaagacaggaacatctgcgcccagcgtcagccccatttccgccagctcatccatgcttagcccgcattgccagagatgatttaatgccaccaggaccgtcgcggcattggaactaccaccgccgagaccgccgcccatcggcaaacgcttgtcaatgctgatattcgcaccgcttcccgtcggaagacgcccgctgtctgccgcagttttcatcaacaatcgcgctgcgcgaacgatcaggttatcttcatgttccacgccttcaacgggcgttaacagacgaatatccccatcgtcacgaagctcaatgctgatggtgtcgccgtaatcaagaaactgaaacagcgtttgcagcgtgtggtaaccatccgcacgctgaccggtaatgtataaaaacagattaagttttgccggagagggccactgtgtccgcattatttcactatccagttatccatttttaacttgatgcgttgaccaccgtcggtgagttccatattggctggcatcgcaggttgcgttttggtgtcataaccaccataaacaaccttccagtttttgccattctggctgtaggtaatttcgctcaggcggtactggtcgtccagtttgtagtcggttgcatcacccggtaaacctaaaatccactggcgcaagctgttgagcggaattggcattccggtcaatttgccaatcatctcttcggcgtcatcggcggtataacgctgacctttattgtcgactaactgcacgttacccggttgagcattcagctccagttccgtgctgcccaatgggttagtgagcagcagacggtagcgatcctggccggtttgctgccagaaaaagcgggcgtacactttttgttggtcagaaatataagcgaacgcgccgcgagtctgatactgattaagattgcgcacgtcttgctgatgctgacgccattgtgggctatccgggcttttgccaggacctttgggcgtggtaacggaacaggcagtgagcacaagagcagccagcggtagcaggcggataagacgaaaatcgggcaggggcatagtgatgacaagtccttgagatacgttgcagttataacccttaatgctagcgttaccgtccgctatcgtctatgttcaagttgtcttaattgccagaatctaacggctttcggcaattactccaaaagggggcgctctcttttattgatcttacgcatcctgtatgatgcaagcagactaaccctatcaacgttggtattatttcccgcagacatgacccttttagcactcggtatcaaccataaaacggcacctgtaagcctgcgagaacgtgtaagctttagcccggataagctcgatcaggcgcttgacagcctgcttgcgcagccgatggtgcagggcggcgtggtgctgagcacgtgcaaccgcacggaactttatcttagcgttgaagagcaggacaacctgcaagaggcgttaatccgctggctttgcgattatcacaatcttaatgaagaagatctgcgtaaaagcctctactggcatcaggataacgacgcggttagccatttaatgcgtgttgccagcggcctggatagtctggttctgggggagccgcagatcctcggtcaggttaaaaaagcgtttgccgatagccaaaaaggtcatatgaaggccagcgaactggaacgcatgttccagaaatctttctctgtcgcgaaacgcgttcgcactgaaacagatatcggtgccagcgctgtgtctgtcgcttttgcggcttgtacgctggcgcggcagatctttgaaagcctctctacggtcacagtgttgctggtaggcgcgggcgaaactatcgagctggtggcgcgtcatctgcgcgaacacaaagtacagaagatgattatcgccaaccgcactcgcgaacgtgcccaaattctggcagatgaagtcggcgcggaagtgattgccctgagtgatatcgacgaacgtctgcgcgaagccgatatcatcatcagttccaccgccagcccgttaccgattatcgggaaaggcatggtggagcgcgcattaaaaagccgtcgcaaccaaccaatgctgttggtggatattgccgttccgcgcgatgttgagccggaagttggcaaactggcgaatgcttatctttatagcgttgatgatctgcaaagcatcattagccacaacctggcgcagcgtaaagccgcagcggttgaggcggaaactattgtcgctcaggaaaccagcgaatttatggcgtggctgcgagcacaaagcgccagcgaaaccattcgcgagtatcgcagccaggcagagcaagttcgcgatgagttaaccgccaaagcgttagcggcccttgagcagggcggcgacgcgcaagccattatgcaggatctggcatggaaactgactaaccgcttgatccatgcgccaacgaaaagtcttcaacaggccgcccgtgacggggataacgaacgcctgaatattctgcgcgacagcctcgggctggagtaacagtacatcattttctttttttacagggtgcatttacgcctatgaagccttctatcgttgccaaactggaagccctgcatgaacgccatgaagaagttcaggcgttgctgggtgacgcgcaaactatcgccgaccaggaacgttttcgcgcattaagtcgcgaatatgcgcagttaagtgatgttagccgctgttttaccgactggcaacaggttcaggaagatatcgaaaccgcacagatgatgctcgatgatcctgaaatgcgtgagatggcgcaggatgaactgcgcgaagctaaagaaaaaagcgagcaactggaacagcaattacaggttctgttactgccaaaagatcctgatgacgaacgtaacgccttcctcgaagtccgagccggaaccggcggcgacgaagcggcgctgttcgcgggcgatctgttccgtatgtacagccgttatgccgaagcccgccgctggcgggtagaaatcatgagcgccagcgagggtgaacatggtggttataaagagatcatcgccaaaattagcggtgatggtgtgtatggtcgtctgaaatttgaatccggcggtcatcgcgtgcaacgtgttcctgctacggaaagccagggtcgtattcatacttctgcttgtaccgttgcggtaatgccagaactgcctgacgcagaactgccggacatcaacccagcagatttacgcattgatactttccgcagcagtggggcgggtggtcagcacgttaacaccaccgatagcgcaattcgtattactcacttgccgaccgggattgttgttgaatgtcaggacgaacgtagtcaacataaaaacaaagctaaagcactttctgttctcggtgctcgcatccacgctgctgaaatggcaaaacgccaacaggccgaagcgtctacccgtcgtaacctgctggggagtggcgatcgcagcgaccgtaaccgtacttacaacttcccgcaggggcgcgttaccgatcaccgcatcaacctgacgctctaccgcctggatgaagtgatggaaggtaagctggatatgctgattgaaccgattatccaggaacatcaggccgaccaactggcggcgttgtccgagcaggaataatggaatatcaacactggttacgtgaagcaataagccaacttcaggcgagcgaaagcccgcggcgtgatgctgaaatcctgctggagcatgttaccggcagagggcgtacttttattctcgcctttggtgaaacgcagctgactgacgaacaatgtcagcaacttgatgcgctactgacacgtcgtcgcgatggtgaacccattgctcatttaaccggggtgcgagaattctggagcttgccgttatttgttagcccagcgaccttaattccgcgcccggatacggagtgtctggtggagcaggcactggcgcggttgcctgaacaaccttgccgtattctcgatctcgggacgggtaccggggcgattgcgcttgcgctggctagcgagcgcccggactgcgaaattatcgctgtagatcgtatgcctgatgctgtctccctggcacaacgtaatgcccagcatctggcgatcaaaaatatccacattctgcaaagcgactggtttagcgcgctagccgggcagcagtttgcgatgattgtcagcaatccgccgtatattgacgagcaggaccctcatcttcaacaaggcgatgtccgctttgagccgctcactgcgctggttgcggcagacagtggaatggcagacatcgtgcatatcatcgaacagagccgtaacgcgctggtatccggcggctttctgcttctggaacatggctggcagcagggcgaagcggtgcgacaagcatttatcctcgcggggtatcatgacgtcgaaacctgccgtgactatggtgataacgagcgcgtaacgctcggccgctattatcaatgacaagtttttctacactgcttagtgttcatcttattagtatcgcgctttctgttgggctattaaccttacgtttctggctacgttatcagaagcatccacaggcatttgctcgctggacgcgcattgtgccgccggttgtcgatacgctgttactgttaagcggcattgcgttgatggctaaagcgcacatcctgccattttccgggcaggcacagtggctgactgaaaagctgtttggagttatcatttatatcgttttgggttttattgcactcgattatcgtcgtatgcacagtcagcaggcgcgcattattgccttcccgctggcgttggtggtgctgtacatcatcattaaactcgccaccacaaaagtaccgttactggggtaagtcatgagaagcttagctgatttcgaatttaataaagcgccattgtgcgaaggcatgatcctggcttgcgaagcaatccgccgcgattttcccagccaagatgtttacgacgaactggagcgtctcgttagtctggcgaaggaagaaatcagccagcttctgcctttagaagagcagttggaaaaactgatcgcgctgttttacggcgactggggatttaaagccagtcgcggtgtttatcgtctttccgatgcattatggctggaccaggtgttaaagaatcgacagggcagtgcggtaagtttaggtgcggttttattatgggtcgcgaatcgtctcgatttgccgctgctgccggtgattttccctacgcagctgatattgcgcattgaatgtccggatggcgaaatttggctgattaatccttttaacggtgaaagcttaagcgaacatatgctggacgtatggttaaagggaaatatcagcccgagcgcggaactgttttatgaagaccttgatgaagctgataacattgaggtaatccgcaaattgctggatacactcaaagccagcttgatggaagaaaatcagatggagctggcgttacgcaccagcgaagctttattacaattcaaccctgaagatccctatgaaattcgcgatcgcgggttgatttatgcgcaactggattgcgaacacgttgcgttgaacgatttaagttatttcgttgaacagtgtccggaagacccgatcagcgaaatgatccgtgcgcaaataaataacatcgcgcataaacatattgtgctgcattaattaatcgacattttactcaagattaaggcgatcctatgaaacaaaaagtggttagcattggcgacatcaacgtagcaaatgacctgccgttcgtactgtttggcggtatgaacgtgttggaatctcgcgatctggcgatgcgcatttgcgagcactacgtaactgtgacccagaaactgggtatcccttacgtgttcaaagcctcttttgacaaagccaaccgctcctccatccactcttatcgtggaccgggcctggaagaagggatgaaaatcttccaggagttgaagcagacttttggcgtgaaaattatcaccgacgttcacgaaccaagtcaggcacagcccgttgctgatgtcgtggatgtgattcagttgccggcgtttcttgctcgccagactgacctggttgaagccatggcgaaaaccggtgcggtaattaacgtcaagaaaccacagtttgtcagcccgggacagatgggtaatatcgttgataaattcaaagaaggcggcaacgaaaaagtgattctttgcgatcgcggtgctaacttcggctatgacaacctggttgtcgatatgctgggcttcagcattatgaagaaagtgtctggtaacagcccggtgattttcgacgtgacccacgcactgcaatgccgcgatccgtttggcgcagcttccggtggtcgtcgtgctcaggtggctgagctggcacgagccggtatggcggtaggtctggcggggctgtttattgaagcgcatccggatccggaacatgcgaaatgtgatggtccatccgcgctgccgctggctaaactggaaccgttcctcaagcagatgaaagcgattgatgatctggtgaaaggtttcgaagaactggataccagcaagtaatcttttttgcttgaaaaataaagtattagcgttctgcgttaagacttttttcatgggtgccggatacaaaaaaggccgcaggctgttacccctgcggccggtttcgggcgcatattgccatcacggcagcctgacgcccgttttcaccttacttccggttacgccaccagctgacaatcgctgcggtaataattcccgccaggatcggtgctgccaggtcgtgccagaaaatcatggcaaactgcgcgagcgtcatatagccgccttgttgtaatgacaacattttgcggctattcttgaattgttctggttcaagattagcccccgttctgttgtcaggttgtacctctcaacgtgcgggggttttctctttccagcaaccaatgccaccagggataaagcccccgcaacattgcgcctcaccggataacgccggcttggtgtggatactacgactcaattcatcttcacttcatccctgaaatgtttgcaatgaagagtgcattccggtttttcaacagctgttacagtcatttcatgagtgctctggatgaggcttccagctcgggttgccaatatttacttgtggaagtgataaagacaaaaatggccgcaggctgttacccctgcggccggtttcgggcgcatattgccatcacggcagcctgacgcccgttttcaccttacttccggttacgccaccagccgacaatcgctgcggtaataattcccgccaggatcggtgccgccaggtcgtgccagaaagtcatggcaaactgcgcgagcgtcatatagccgccttgttgtaatgacaacattttgcggctattcttgaagtgtctggtttcaagattagcccccgttctgttgtcaggttttacctctcaacgtgcgggggttttctctttccagcaaccaatgccaccagggataaagcccccgcaacattgcgcctcaccggataattccggcttggtgtggatactacgtctcaattcatcttcacttcatccctgaaatgtttgcaataaagagtacattccggcttttcaacagctgttgcagtcgtttcatgagtgctctggatgatgcttccagctcgggttgccaatatttacttgtggaagagataaagacaaaaatggccgcaggctgttacccctgcggccggtttcgggcgcatattgccatcacggcagcctgacgcccgttttcaccttacttccggttacgccaccagctgacaatcgctgcggtaataattcccgccaggatcggtgctgccaggtcgtgccagaaaatcatggcaaactgcgcgagcgtcatatagccgccttgttgtaatgacaacattttgcggctattcttgaagtgtctggtttcaagattagcccccgttttgttgtcaggttttacctctcaacgtgcgggggttttctctttccagcaaccaatgccaccagggataaagccccgcaacattgcgcctcaccggataacgccggcttggtgtggatactacgtcgcaattcatcttcacttcatccctgaaatgtttgcaatgaagagtacattccggcttttcaacagctgttgcagtggtttcgtgcagggtgtggtacaggctcgcaattctgattaacgacctgtccaggtagtatgaagaaatacaataagcaggaatttatattatctcccccgattaccgtcatcggaggagatataactgtcaggcaaatatcgtcatcaaataggcggcaaacagtgccagatgcgctgcgccattgagcatgttagtacgtccggtggagaaggagatatggcacagcactaaagaggccaccatcaccaccatttctggcgcaccaagtgcaaactgcaattcgttacccgtcataaaggcaattagcgtgacgacaggtacggtaaggctaatggttgctaacacactaccaaagaacagattcatcgcgcgctgaacctggttgttcaacactgcttttaatgcacctaaaccttccgggctcagaatcaacagtgccaccaggaagccagtaaaggcgacaggggcattcatgctgtcgagcaatgtctccaggctgctggcgttcattttggtcaccgcaataacggcaatcagatggataatcaaccagatagcatgccacaggctgctatgggcagacggtttaccgtgatgcgggtcgtcatcatcactgtcatcttcgtgctcgtagacaaacaaactttgatgcgttttggtctggatcagcaaaaatacgccatacattgccgcagaaattaatgctaccagtaacgcctgaccggtactaaaattcgccgcaggcagagccattggaaataccagtacgattatcgccagggggaacagcgcaattaaatactgcttgataccaaacagattcatatattgggtggcaaacttacgaccgcccaacaataaactaaagccaaccagcccaccggtaacaatcataatgatactatagagcgtatcacgcattagcgttggcgcggcgtcgccggttgccattaaagcactaatcaaactgacttcaagaataaccacactaaggctaagaataaggctaccgtaaggttctcccaggcgatgggctaatacgtccgcatgacggacaacactaaaggcgctacttaaaataccaataagcgcaagaagattgatggcaatgaccactggtagtgtctggctgcttccccacaggaacagcactaccagcgccagaaccgggaaaataaggctagtctccttgtggcgggtttttaccgcctcttgagcattactcattatggttatccctttgcagatgaatttatcgaaaatgtaaaaaataggtaggaaaaataacagaaagtgtctggatatcggtaacattttacgaatttttaccccgctgtcgattttttactcattggggcataaaaataagtattacgtttagacaatgtttgttttagcgtctcttaagaagagtctgacctgaaaattcttatgttttggcaagagtagatattgttgaccacacttaatgttcaactttgtaaaaggagtcaacgatgccgtataaaacgaaaagcgatctgccggaaagcgtaaagcacgttctaccgtctcatgcccaggatatctataaagaagcgttcaacagcgcatgggatcaatataaagataaagaagatcggcgtgatgacgccagtcgcgaagaaaccgcgcataaagtggcctgggctgctgtgaagcatgaatatgccaaaggggatgatgataaatggcataaaaaaagctaaaaccggtcgcttagttaaagctattcgtgcggtgttgccttgcaagtggtccgtggattgcatattgtcccgttagtggtttcaaaatgagcagtaaaaatgtccggaagacaccaaaaagttgtcgcagggaagtatgcagtggcggaagtgtaaggtgataacgcgtgatttcttgatgaatgccgattgtaaaacggcatttggtgccattgaagaaagtctcttatggagtgcagaacaacgggcggctagcctggcggcgacgctggcttgtcgacctgatgagggaccggtgtggatcttcggctatggaagcttgatgtggaatccggcactggagtttaccgaaagctgcaccggtacactggttggatggcatcgcgcattttgcctgcgcctgaccgccgggcgcgggactgcgcaccagccgggacggatgcttgcactgaaagagggcggacgcaccacaggcgtcgcctatcgactgccagaagagacgctggagcaggaactaaccctgttgtggaagcgagagatgattaccggctgttatctgccaacctggtgtcagcttgatcttgatgatggacgcacagtaaacgccattgtgtttattatggacccgcgacatccagaatatgaatctgatactcgcgctcaggtcatcgcgccgttgattgcggcggcgagcggtccgctgggaaccaacgcacaatacctgtttagtctggaacaggagcttatcaaactgggaatgcaggacgatgggctgaatgatttgctggtaagcgtaaaaaaactgctggcggagaattttccggatggtgtgttacgtccgggattcgcctgagtaaacttcccgcatagtggggcgtcagacgccccctcaaacattaaaatgtgagcactttatcggcactcagcgtccattgcgccagttccacaagagtaccgatttccaccccatcaatcagaggaagtgtactaatcccgcgcccgtcggtacaggttttgcacaatttcaccggtacattctgagcggtaaggatctccagcatttgctgaatgttgtagccttcccctggtttttgcccgcgcaacccggctgtgaccgcatcagacatgaggaacagacgcagatccagattgctctcctgctctcgtaacgcaatggccagccgcaagctgttaaacaaggattcgctcccgtaaggtgcgccattggcaacgatcacgattttttgcattatttactcctgtattcagggaattagacactcatcttctatcttactgcttctgcagcgtctgaccaatcggtcacatttttaaggattttcctgaaagcgcgagaaaatacgacaaaagttgccagtaatcgttattctttaaggctatggtttttcattattaccggaagttaccgacgttttgagccgtttcgttcctcgcattatcccgttttatttactcttgcttgtagcaggcggtacagctaacgcacaatctaccttcgagcaaaaagcggcaaatccctttgataataacaatgatggtctgccggatttaggcatggctcccgaaaatcatgatggggaaaaacactttgctgaaattgtgaaagatttcggcgaaaccagtatgaatgataacgggctggatactggcgagcaggcaaaagctttcgcattgggaaaagtccgcgacgcgcttagtcaacaggttaatcagcacgtagagtcctggctaagtccgtggggaaatgccagtgttgacgtcaaagtggataacgaaggacatttcaccggcagtcgtggaagctggtttgtgccgttacaagataatgatcgttatctcacctggagccagcttggtcttactcagcaggataatgggttggtgagcaatgtgggcgttgggcaacgctgggcgcgcggcaactggctggtgggttataacactttttatgacaacttgctggacgaaaatcttcagcgagcgggctttggtgccgaagcgtggggcgaatatttgcgattaagcacaaacttttatcagccgtttgctgcatggcatgaacagacagccacgcaggaacaacggatggcgcgcgggtacgacctgacagctcggatgcgcatgccgttctatcaacacctcaataccagtgtcagcctagaacagtattttggtgatcgtgttgatttgtttaactctggtacgggttatcacaatcccgtcgcgttgagtctgggattaaattacacccctgtgccattagtcactgtgacggcccagcataaacagggtgaaagtggcgaaaatcaaaataacctcgggctgaatcttaattaccgctttggtgtaccgctcaaaaaacaactttctgcgggcgaggttgccgaaagtcagagcttacgtggtagtcgctatgacaatccgcagcgaaataatctaccgactcttgagtaccgacagcgaaaaacgttaacggtgtttctggcgacaccgccgtgggatctaaaacctggcgaaacagtgccgctgaaattacaaatccgcagtcgttacggtattcggcaactgatttggcagggcgatacgcagatattaagtttgacgccgggcgcacaagccaacagcgcggagggctggacgctgatcatgcctgactggcagaacggggaaggggcaagcaatcactggcgattgtctgtggtggtggaagataaccaggggcagcgtgtctcctccaatgagatcacgctaacgcttgtcgaaccgttcgatgcattgagtaacgacgaactgcgctgggaaccgtaatcagaaaatgcgctcctgatgcacccataccgctgcttccacgcgagacttgagcttcattttcttcagcatgtgcttgacgtgcacttttactgtgctttcggtgatatccaggcggcgggcaatcatcttgttcggcaaaccctgggcaatcagcttgagaatatcgcgctcgcgtggggttaactggttaacatcgcgctcagtagtggcacggttagcgcgcaagctggcggccagaacaggcgttaatgcttcgcttaataccatttcgccagcagctgcctgatgcaatgctttcagcagatcttccggttccatatcttttaacagatagccatccgcgccgcgtttcagtgcggtgaccacatcttcttcatggttagagacgctgaataccacaatgcgcccactgagggacttttcgcgcagtttatccagcgtttccagaccgttcatgccgggcatattgagatctaacaggatcagatcgggatcaagagactccgccagttcaataccctgttcgccattactcgcttcgccaaccacggtgatatctggtgccatactgataagctgttttacgccagttcgcagcatcgggtgatcgtcaatcagcaggatagtagccggttcctgattactcatgggtatctccttggacgtctgtgaaagttttttcgggaataaaggtgaccaccacttcggtgccaccactttcacgacggcggacgcggcaatcgcctcgtaaactttgcgcacgatcgcgcattattatcatgccgtagtgattgctgcggatggcattttcaggcacgccgcagccgttatcctggacggtcagtttgacctgattatcgttttgcgccaccgtcaccacgacttcactcgcttggctatgtttgagggcgttacttaatgcctcacgggcaatttgcaacaagtggattgcctgatggctaggcaccaggcgaggcggcaattgataatccagcttcaccgggaagccaaatttggcgctgtactcttcgcaactcgcctccagcgccggacgtaatccaggctcggtgagctgcaagcggaatgtggtgagcaattcacgcaactgcgcccaggatgcattcagttcgttacggatctgacttaacagttcgcggctgctttctggcagcgcatcgccctgcatctgtaaacaactcacctgcatcttcatgcaagagagagattgggcaatagaatcatgcagttcgcgcgcaatggtggcacgctcttccatcacgatcaactgttgctgacgttcctgatggcgatccagcgccagcgtggcggtgagttgttcaaccagggtatccaccagttgttgttgatcatggctaagatgacgcccctgcggcagggtcgccagcaaaataccgtactgcgtatgagagtcagccagccgccacttcagggtcgtgccgcgatcaccaacgggtaatacgccgcgcgggcagagctggcagcctttatcatcacaagtcatatctggctggcaggtaaactcctgatgattctcttcatcatcagtgtcatacacccgcaattcgatatcacgtagcagggttaaattctgtaagccgttgagtacaggactcaggcgttcacacagcggggcgcgggaatgcaaacggcggttagcctgccataaaaaagagaggatctgatttttatgctccagcccggcggttttctcctgaacccgctgctcaagtacggcataactttcggccagttctgcagacatattgttcaacgcagttccaagcatcgccatttcgttgcgcccgctgatgtttgcgcgttgggtaaaatcgcgatgactgacggcactcgccattgccagcagttgccgccacggttgtagcagtcgcgcccgcaaccagataatagtgaacaccagtaaaagtgccataaataccgccattacccgatggaccagtaccactgtctcgatgcgcatttccgtggtgcggtcaaaaccagataccagttgatcaagcccggcaacaaactggctgacatccgcactcaccgtttctcggttttgtgcacgcatcagcgcagggatcagttcattacgccagtaatcttgtaaaccctgtaattgcgccagttgtccgtctcgttctgctgctcgagtcaactcggcgctaaatgccgtttgttccatctctttaattaagggcttgtctttctcgcttaatggcactgccgccaacagacggtaactttgcatgcgcaggcttcccgctttgttgatcgcatgggcgctgccctgaacgccttgcaccagccagccagaaaccgccatccctgccagtccaatagcagtagaaagcaacacaataagcgcaacctgattaaccagggtgagcggagagagacaacgtttaagcatgtaaacctcttccttcaggctttaaatgagcaataaccttaatgaatgtgacgatacattctggaatggcagtattctcggctattggctgaagtatacccatacccggaaagagttactccttatttgccgtgtggttagtcgctttacatcggtaagggtagggattttacagcaccgtgaaaaatctcataatttttatgaagtcactgtactcactatgggtaatgataaatatcaatgatagataaagttatcttatcgtttgatttacatcaaattgcctttagctacagacactaaggtggcagacatcgaaacgagtatcagaggtgtctatgagtcacagttccgcccccgaaagggctactggagctgtcattacagattggcgaccggaagatcctgcgttctggcaacaacgcggtcaacgtattgccagccgcaacctgtggatttccgttccctgtctgctgctggcgttttgcgtatggatgttgttcagcgctgttgcggtgaacctaccgaaagtcggctttaattttacgaccgatcagctatttatgttgactgcgctgcctagcgtttctggcgcgttattacgtgttccatactcctttatggttcctatcttcggtggtcgtcgctggacggcgttcagcaccggtattctgattattccttgcgtctggctgggttttgccgtgcaggatacctccacgccttatagcgtcttcatcatcatctctctgctatgcggctttgctggcgcgaacttcgcatccagtatggcaaacatcagcttcttctttccgaaacagaagcagggtggcgcgctgggtctgaatggtggtctgggaaacatgggcgtcagcgtcatgcagttggttgctccgctggtggtaagtctgagcattttcgcagtatttggtagccagggcgtcaaacagccggatgggactgagctgtatctggcgaatgcgtcctggatatgggtgccgttccttgccatcttcaccattgcggcgtggtttggcatgaacgatcttgctaccagcaaagcctccatcaaggagcagttgccggtactcaaacggggtcatctgtggattatgagcctgctgtatctggcaaccttcggctccttcatcggcttctccgcgggctttgcaatgctgagtaaaacgcagttcccggatgttcagattctgcaatacgctttcttcgggccgtttattggtgcgctggcgcgttctgcaggtggtgcattatctgaccgtctgggcggaactcgtgtcacgctggtgaactttattctgatggcgattttcagcggcctgctgttcctgaccttaccgactgacgggcagggcggaagcttcatggcgttcttcgcggtcttcctggcgctgttcctgacagctgggctgggtagtggttccactttccagatgattagtgtgatcttccgtaaactgacaatggatcgcgtgaaagcagaagggggttctgacgaacgtgcgatgcgtgaagcggcaaccgacacggcggcggcgctgggtttcatctctgcgattggcgcgattggtggcttctttatcccgaaagcgtttggtagcagcctggcattaacgggtagcccagtcggcgcaatgaaggtatttttgattttctatatcgcctgcgtagtgattacctgggcggtatatggtcggcattctaaaaaataaaccgttactcgtcatacttcgggttacatgtgctgcggctgcgttcattcaccccagtcacttactttagtaagctcctgggattcattcacttgccgccttcctgtaaaccgaattatatagagtaaaatatttgattatcctttgcgcggcatgatgtcgcgctttttttatgcgtcatttagttacaacatactaatgttatatggtttatttcgccggatttcattaagagccattaatatgttacccatggggaatactccttaatacccatctgcataaaaatcttaatagtttaaataactacaggtataaaacgtcttaatttacagtctgttatgtggtggctgttaattatcctaaaggggtatcttaggaatttactttatttttcatccccatcactcttgatcgttatcaattcccacgctgtttcagagcgttaccttgcccttaaacattagcaatgtcgatttatcagagggccgacaggctcccacaggagaaaaccgatgagtaaattcctggaccggtttcgctacttcaaacagaagggtgaaacctttgccgatgggcatggccagcttctcaataccaaccgtgactgggaggatggatatcgccagcgttggcagcatgacaaaatcgtccgctctacccacggggtaaactgcaccggctcctgcagctggaaaatctacgtcaaaaacggtctggtcacctgggaaacccagcagactgactatccgcgtacccgtccggatctgccaaaccatgaacctcgcggctgcccgcgcggtgccagctactcctggtatctttacagtgccaaccgcctgaaatacccgatgatgcgcaaacgcctgatgaaaatgtggcgtgaagcgaaggcgctgcatagcgatccggttgaggcatgggcttctatcattgaagacgccgataaagcgaaaagctttaagcaggcgcgtggacgcggtggatttgttcgttcttcctggcaggaggtgaacgaactgatcgccgcatctaacgtttacaccatcaaaaactacggcccggaccgtgttgctggtttcagcccaattccggcaatgagcatggtttcttacgcaagcggtgcacgctatctcagcctgattggcggtacttgcttaagcttctacgactggtactgcgacttgcctcctgcgtctccgcaaacctggggcgagcaaactgacgtaccggaatctgctgactggtacaactccagctacatcatcgcctgggggagtaacgtgccgcagacgcgtaccccggatgctcacttctttactgaagtgcgttacaaagggaccaaaactgttgccgtcacaccagactacgctgaaatcgccaaactgtgcgatctgtggctggcaccgaaacagggcaccgatgcggcaatggcgctggcgatgggccacgtaatgctgcgtgaattccacctcgacaacccaagccagtatttcaccgactatgtgcgtcgctacaccgacatgccgatgctggtgatgctggaagaacgcgacggttactacgctgcaggtcgtatgctgcgcgctgctgatctggttgatgcgctgggccaggaaaacaatccggaatggaaaactgtcgcctttaataccaatggcgaaatggttgcgccgaacggttctattggcttccgctggggcgagaagggcaaatggaatcttgagcagcgcgacggcaaaactggcgaagaaaccgagctgcaactgagcctgctgggtagccaggatgagatcgctgaggtaggcttcccgtactttggtggcgacggcacggaacacttcaacaaagtggaactggaaaacgtgctgctgcacaaactgccggtgaaacgcctgcaactggctgatggcagcaccgccctggtgaccaccgtttatgatctgacgctggcaaactacggtctggaacgtggcctgaacgacgttaactgtgcaaccagctatgacgatgtgaaagcttataccccggcctgggccgagcagattaccggcgtttctcgcagccagattattcgcatcgcccgtgaatttgccgataacgctgataaaacgcacggtcgtagcatgattatcgtcggtgcggggctgaaccactggtatcacctcgatatgaactatcgtggtctgatcaacatgctgattttctgcggctgtgtcggtcagagcgggggcggctgggcgcactatgtaggtcaggaaaaactgcgtccgcaaaccggctggcagccgctggcgtttgcccttgactggcagcgtccggcgcgtcacatgaacagcacttcttatttctataaccactccagccagtggcgttatgaaaccgtcacggcggaagagttgctgagtccgatggcggacaaatcccgctataccggacacttgatcgactttaacgtccgtgcggaacgcatgggctggctgccgtctgcaccgcagttaggcactaacccgctgactatcgctggcgaagcggaaaaagccgggatgaatccggtggactatacggtgaaatccctgaaagagggttccatccgttttgcggcagaacaaccagaaaacggtaaaaaccacccgcgcaacctgttcatctggcgttctaacctgctcggttcttccggtaaaggtcatgagtttatgctcaagtacctgctggggacggagcacggtatccagggtaaagatctggggcaacagggcggcgtgaagccggaagaagtggactggcaggacaatggtctggaaggcaagctggatctggtggttacgctggacttccgtctgagcagcacctgtctctattccgacatcattttgccgacggcgacctggtacgaaaaagacgacatgaatactagcgatatgcatccgtttattcacccgctgtctgcggcggtcgatccggcctgggaagcgaaaagcgactgggaaatctacaaagccatcgcgaagaaattctccgaagtgtgcgtcggccatctgggtaaagaaaccgacatcgtcacgctgcctatccagcatgactctgccgctgaactggcgcagccgctggatgtgaaagactggaaaaaaggcgagtgcgacctgatcccaggtaaaaccgcgccacacattatggtcgtagagcgcgattatccggcgacttacgaacgctttacctctatcggcccgctgatggagaaaatcggtaatggcggtaaagggattgcctggaacacccagagcgagatggatctgctgcgtaagctcaactacaccaaagcggaaggtccggcgaaaggccagccgatgctgaacaccgcaattgatgcggcagagatgatcctgacactggcaccggaaaccaacggtcaggtagccgtgaaagcctgggctgccctgagcgaatttaccggtcgtgaccatacgcatctggcgctgaataaagaagacgagaagatccgcttccgcgatattcaggcacagccgcgcaaaattatctccagcccgacctggtctggtctggaagatgaacacgtttcttacaacgccggttacaccaacgttcacgagctgatcccatggcgtacgctctctggtcgtcagcaactgtatcaggatcaccagtggatgcgtgatttcggtgaaagcctgctggtttatcgtccgccgatcgacacccgtagcgtgaaagaagtgataggccagaaatccaacggcaaccaggaaaaagcgctcaacttcctgacgccgcaccagaagtggggtatccactccacctacagcgacaacctgctgatgctgactttaggtcgcggtggtccggtggtctggttgagtgaagccgatgccaaagatctgggtatcgccgataacgactggattgaagtcttcaacagcaacggtgctctgactgcccgtgcggttgtcagccagcgtgttccggcagggatgaccatgatgtaccacgcgcaggaacgtatcgttaacctgcctggtagcgaaattacccaacagcgtggtggtatccataacagcgtcacccgtatcacgccgaaaccgacgcatatgatcggcggctatgcccatctggcatacggctttaactactatggcaccgtaggttctaaccgcgatgagtttgttgtagtgcgtaagatgaagaacattgactggttagatggcgaaggcaatgaccaggtacaggagagcgtaaaatgaaaattcgtagtcaagtcggcatggtgctgaatctcgataagtgcatcggctgccacacctgtagtgttacctgtaaaaacgtctggaccagccgtgaaggcgtggaatatgcgtggttcaacaacgtggaaaccaagccgggccagggcttcccgactgactgggaaaaccaggaaaaatacaaaggcggctggatccgtaaaatcaacggcaaactgcagccgcgcatgggtaaccgtgccatgctgctgggtaaaatcttcgctaacccgcatctgccggggatcgacgattattacgagccgttcgattttgactatcagaacctgcataccgcgccggaaggcagcaaaagccagccgattgcccgtccgcgtagcctgattaccggggaacggatggcgaaaatcgaaaaagggccgaactgggaagatgacctgggcggtgagtttgacaaactggcgaaagacaagaacttcgacaacatccagaaggcgatgtatagccagttcgaaaacaccttcatgatgtatttgccgcgcctgtgcgaacactgcctgaacccggcatgtgtggcgacctgcccgagcggtgcgatttacaagcgtgaagaagatggcatcgtcctgatcgaccaggataaatgccgtggctggcgtatgtgcatcactggatgcccgtacaaaaaaatctacttcaactggaagagcggtaagtctgagaagtgcatcttctgctatccgcgtattgaagcgggtcagccgaccgtgtgcagtgaaacctgtgtcggtcgtatccgttatcttggcgtgctgttgtacgatgccgacgctattgaacgtgcagccagcaccgagaacgagaaagatctttaccagcgtcagctggacgtgttcctcgatccgaacgatccgaaagtcatcgagcaggcgattaaagacggtattccgctgagcgttattgaagccgcacagcagagcccggtttataaaatggcaatggaatggaaactggcgctgccgctgcatccggaatatcgcacactgccgatggtctggtacgtgccgcctctgtctccgattcagtctgcagcagacgcgggtgagctgggtagcaacggcattctgccagacgtcgaaagcctgcgtattccggtacagtatctggcgaatctgctgaccgccggtgataccaaaccggtactgcgcgcactgaaacgtatgctggcgatgcgtcattacaaacgtgctgaaaccgttgacggtaaagttgatacccgtgcgctggaagaggtcggtctgaccgaagcccaggcacaggagatgtaccgttatctggcgattgctaactacgaagatcgctttgtggtgccgagtagtcatcgtgaactggcacgggaagccttcccggagaaaaatggctgcggctttacctttggtgatggctgccacggtagtgataccaaattcaatctgttcaacagccgtcgtatcgatgccatcgatgtgaccagcaaaacggagccgcatccatgatcgaactcgtgattgtaagccgtctccttgaatatccggatgctgccttatggcagcatcaacaagagatgtttgaggcgattgccgcgagcaaaaatctgccaaaagaggatgcccatgcgctgggcattttcctgcgcgatttaacgacgatggatccgctcgatgcccaggcgcagtacagcgaactgttcgaccgtggccgcgccacgagtctgttgctgtttgaacatgtgcacggcgaatcccgcgaccgcggccaggcgatggtggacctgctggcgcagtacgagcagcacggcttgcagttaaacagccgcgaattgccggaccatctgccgctgtatctggagtacctggcgcagctgccgcaaagcgaagccgtggaaggtttgaaagatatcgcgccgattctggcattgctgagcgcgcgtctgcaacagcgtgaaagccgttatgccgtgctgtttgatctgctgctgaaactggcgaataccgctatcgacagcgacaaagtggcggaaaaaattgccgacgaagcgcgcgatgatacgccgcaggcgctggatgctgtctgggaagaagagcaggttaaattctttgctgacaaaggctgcggtgatagtgcaatcactgcgcatcagcgtcgctttgccggtgccgtcgcgccgcaatatctgaatatcaccaccggaggacagcactaatgcaattcctgaatatgttcttctttgatatctacccgtacatagccggggcggtcttcctgattggtagctggctgcgttatgactacgggcagtacacctggcgcgcggcgtccagccagatgctggatcgcaaagggatgaacctggcgagcaacctgttccatatcgggattctggggatttttgtcggtcacttcttcggtatgctgacgccgcactggatgtatgaagcctggctgccgattgaagtgaaacagaaaatggcaatgtttgctggtggtgccagcggcgtgctgtgtctgattggcggcgtgctgttgctgaaacgtcgtctgttcagcccacgcgtgcgtgcaaccactaccggagcggatatcctgatcctgagcctgctcgttatccagtgcgcgctgggcctgttgaccattccgttctccgctcagcatatggacggtagcgagatgatgaaactggttggctgggcgcagagcgtggtgaccttccacggtggcgcttctcaacacctcgatggtgtggcgtttatcttccgtctgcacctggtgctggggatgacgttattcctgctgttcccgttcagccgtctgatacacatctggagcgtaccggtggagtatctgacacgtaagtaccagctggtgcgcgctcgtcactaagcgaattttagttcacatagaccctgcttcggcggggtttttttatgggcacggtgcggggtgagttgtcggatgcgcttcgcttatccgacctacaggggaggatattgtaggcccggtaaacgtggtgccatcgggcaaaattagctcggagtaacaggttttgattatttaaggaagcgatggtggtgggggaaggattactcagcgctgcgcgcttcgcccttcgggtcgttgcctgcggcaacgctctcagcctggcgctcaagagcaaccttggtcgaagcttcagttccttccccgcttgggcagaatatttgattgcggatagctttgagaattccggggcttttgaaagtgatggtggtgggggaaggattactcagcgctgcgcgcttcgccctagcggtcgttgcctgcggcaacgctctctcgctgacgctcgagccgaaccttaatcgaagcttctcatccttccccgcatgggcagaatatttgattgcggattcgcttgagagttcagggacttttgaaagtgatggtggtgggggaaggattactcagcgctgcgcgcttcgcccttcgggtcgttgcctgcggcaacgctctctcgctggcgctcgagtgctaccttggtcgaagcttctcatccttccccgcatgggcagaatatttaattgcggattcgttgggaagttcagggacttttgaaagtgatggtggtgggggaaggattcgaaccttcgaagtcgatgacggcagatttacagtctgctccctttggccgctcgggaaccccaccaggggtaattcaaattttgaggtaatgcttgagatggtggtgggggaaggattattcgtcgcttcgctcctcacccttcgggccgttgcctgtggcaacgttctctcgctttcgctcgaatcgaaccttagtcgaaggttctcacccttccccgatgagtgcaaactttcacaatctcaccgaagttaccacatcgctgtggtgaattatggtggtgggggaaggattcgaaccttcgaagtcgatgacggcagatttacagtctgctccctttggccgctcgggaaccccaccacggggtaatgctttttactggcctgctcccttatcgggaagcggggcgcatcatatcaaatgacgcgccgctgtaaagtgttacgttgagaaaaatgaactggttgcgtaattttcatccgtaacggattaaaggtaaccagttatttttgctggcgattaaagaataatcgttcgattaccgtaaacaaagacgcgctgtgccagtactttgtatagtgcacgacttaagacgtttttctcgacgtcacgacctgcgcgcatcatatcttcagctgtgtaggtatgatcgacatgaataacgtcctgcatgatgattgggccttcgtccagattgtcattcacatagtgagcggttgcgccaataatcttcacaccacgttcataggcctggtgataaggacgtgcgccaataaacgctggcaggaaactatggtgaatattgatgatcttattcgggaagcgtgccacaaattccggcgttaatacccgcatatacttcgccagcaccacgtagtcaggttgataagcatcaatggcatccgccatcttttgatcgtgctcgttgcgggttaacccttcatggcttaccagctcaaacggaatatcaaaacgctcaaccagagaacgtaaagtatcgtggttaccaataactgccgcgatttcgacatccaggccgccgtaattggctttcatcaacaaatcgccaaggcaatgcgcttctttagtgaccagaatcactatccggcgacgaccggcaggattcagctcacgcacggagccttctggcaatgcgctatcgagatccgccagcagggtggaatcattaaaaatcccttccagttccgtgcgcataaaaaagcgcccggtacggtgatcaacaaattcattgttctgtacgatatttaactcgtgcttgtagcaaatattggtaatacgtgcgatcagacctttttggtccggacaaatagtacgcagaactttacgttggagactatgcattgctggaaaaaccttgttgagagtgtttgctaaaccgtaccgtcaaccattattggccgcagcactttttaaattttttaccactaccacaagggcagggatcgttgcgaccaaactgcggacgtgtaccgtcaatatagtaccattgaccgttttctttcaaaaatcggctacgttcaattattgcacctgttttaccaccttcggtaaatcgagcaacaaaactgacaaatccgatattgtcggcgtcctgccaacaatgttcaaatacggtcaatcccaaccattcagtatgcgcaaatccggccatcaattcggcacgtaacgccgctgctccacaagagggatgccaggtctttattaaataatctgcgtcttgcatcacaaaagcgcagtaacggctacgcatgagatgttctggatcaggtgcaaccttttcaccagacacataagggtggcaacataggctatactcgacagcactaccacagggacaaagctgagacacaaataatctccctggaaacaataacggcgtattaaccgcctgagtagcactatgttaaccgagcagtagcgatgtggctacgattgcattccaggggaatcttgcgggaataatgagaaagataaaaatagggctggcgctgggatctggcgcggcgagaggttggagccatattggcgttattaatgcgctaaaaaaagtgggtattgaaattgatatcgttgcaggatgtagtattggtagcctggtgggcgctgcctatgcatgcgatcgattatctgcgctggaagattgggtgacctctttcagttattgggatgttttacgcctgatggatctctcctggcagcgcggtgggttactgcgcggcgagcgtgtcttcaatcaataccgcgaaataatgccggaaacagagatcgaaaattgttcccgtcgctttgcggctgttgccaccaatttaagtacgggacgtgaattatggtttactgaaggcgatctccatcttgctattcgcgcaagttgcagtattccaggactcatggcacctgttgcacataacggctactggctggttgatggagcagtcgttaacccaattcctatttccctcacgcgtgcattgggggctgatattgtgatagcggttgacctgcagcacgatgctcatttgatgcaacaagatttgctctcctttaatgtcagtgaagaaaatagcgagaatggtgattctctgccgtggcatgcgcgtctgaaagaaaggttaggcagcataacgacacgtcgggcggtgacagcgccaacggcaacagagattatgaccacttctatccaggtgctggagaaccgccttaaaaggaaccgcatggcaggtgatccgcccgatattctgattcaacctgtttgcccgcaaatatctacgcttgatttccatcgcgcgcacgctgccattgcggccggacagctggcagtggaaaggaaaatggacgaacttttgccgttggtacgcaccaacatttgaccagaatttttatctacacttaagttaattctgacaggcgcaggtggcaatagcatgccactattgagtaaagccagtcaggggagagaacatgacgcagccattggtcggaaaacagattctcattgttgaagatgagcaggtatttcgcagccttctggatagttggttttccagtttgggagcgacaacggtactggcggctgatggggtggatgcccttgagttgctgggaggtttcactccagacctgatgatatgtgatatcgcgatgccacgaatgaacgggcttaaactgctggagcatatacgtaacagaggcgaccagaccccagttctggtgatatctgccactgaaaatatggcagatattgccaaagcgttacgtctgggcgttgaagatgttttgctgaaaccagttaaagatctgaatcgcttgcgcgagatggtttttgcctgtctctatcccagcatgtttaatagccgcgttgaggaagaggaaaggctttttcgcgactgggatgcaatggttgataaccctgccgcagcggcgaaattattacaggaactacaaccgccggttcagcaggtgatttcccattgccgggttaattatcgtcaattggttgccgcggacaaacccggcctggtgcttgatattgccgcacttagcgaaaacgatctggcattttattgccttgatgtcacccgagctggacataatggcgtacttgctgccttgttattacgcgcattgtttaacggattattacaggaacagcttgcacaccaaaatcaacggttgccagagttgggcgcgttattgaagcaggtaaaccatttacttcgtcaggccaatctgccggggcagtttccgctattagttggctattatcatcgcgaactgaaaaatctcattctggtttctgcgggtctgaatgcgacgttaaataccggcgaacaccaggtgcaaatcagtaatggtgttccgttaggcactttaggtaacgcttatttgaatcaattgagccagcgatgcgatgcctggcaatgccaaatatggggaaccggtggtcgactgcgcttgatgttgtctgcagaatgagcaaacgataacgcgggctaaatttgcattacctgctaatgtcggctggtggtactatcgtcgccattcgtataagtaattgtcttaattatgctaactcgcctccttttcagaacttagccccttcggggtgctgatatactgggatgcgatacagaaatatgaacacgttcaaaacacgaacagtccaggagaatttaaatggctgccattaatacgaaagtcaaaaaagccgttatccccgttgcgggattaggaaccaggatgttgccggcgacgaaagccatcccgaaagagatgctgccacttgtcgataagccattaattcaatacgtcgtgaatgaatgtattgcggctggcattactgaaattgtgctggttacacacagttctaaaaactctattgaaaaccactttgataccagttttgaactggaagcaatgctggaaaaacgtgtaaaacgtcaactgcttgatgaagtgcagtctatttgtccaccgcacgtgactattatgcaagttcgtcagggtctggcgaaaggcctgggacacgcggtattgtgtgctcacccggtagtgggtgatgaaccggtagctgttattttgcctgatgttattctggatgaatatgaatccgatttgagtcaggataacctggcagagatgatccgccgctttgatgaaacgggtcatagccagatcatggttgaaccggttgctgatgtgaccgcatatggcgttgtggattgcaaaggcgttgaattagcgccgggtgaaagcgtaccgatggttggtgtggtagaaaaaccgaaagcggatgttgcgccgtctaatctcgctattgtgggtcgttacgtacttagcgcggatatttggccgttgctggcaaaaacccctccgggagctggtgatgaaattcagctcaccgacgcaattgatatgctgatcgaaaaagaaacggtggaagcctatcatatgaaagggaagagccatgactgcggtaataaattaggttacatgcaggccttcgttgaatacggtattcgtcataacacccttggcacggaatttaaagcctggcttgaagaagagatgggcattaagaagtaacatccgtatcggtgttatccacgaaacggcgttgagcaatcgacgccgtttttttatagcttattcttattaaattgtcttaaaccggacaataaaaaatcccgccgctggcgggattttaagcaagtgcaatctacaaaagattattgcttgatcaggaaatcgtcgagggatttaccttgctcatccattgcttttttgattacagctggagtacggccttggccagtccaggttttagtttcgccgttttcgtcaacgtagctatattttgccggacgctgagcacgtttagctttggtgccagatttaacggcagcaaggctattcagcagttcgttcgggtcaataccgtcagcgatcagcatttcgcgatattgctgcagtttacgagtgcgctcttcaacttcagcagcagccgcgctttcttcttcgcgacgttcgttaacaacaacttctaatttttccagcatttcttccagcgtttcaagtgtacattctcttgcctgcgcacgaagagtacggatgttgttcagaattttaagtgcttcgctcattgtagtaatctcaaacttatattggggtggtttgttgaggtaataatagagccttaaattcagttgtgcaatagccaggaatgtaaggaattcaaaattgttctttattttgtgccgccaataaatatcttttcataaaattagccagaaaagacgcggcatatagccctatttacaccgatgatttcgcagcacgtgaggttaaaacttcctgattcatgtcacattttatggggagattatcgtaggctgacgacctttcagtcttctgtattagttgtgtttacgagaattccctattaagcgaatgatgaaaagtagaacagtcgcaataagagcatggacttagtattgcactatctcctggaggtcaacagagggctattacttgcgcaacaggttaaagattgtgaatagttaccagcagtcatttacccgcttataacaagcgaggcagttgtaatgatagctcagaaggattatgcaaggcttcgtaagggagaacgcatatacccacttctgtgcatactgttgagctgaaaaactgacgaattatgataaactccagccaactttatttcatatcattgagggcctgtggctgatggcacagctatatttctactattccgcaatgaatgcgggtaagtctacagcattgttgcaatctagttacaattaccaggaacgcggcatgcgcactgtcgtatatacggcagaaattgatgatcgctttggtgccgggaaagtcagtagccgtataggtttgagtagccctgcaaaattatttaaccaaaatagtagtttatttgatgagattcgtgcggaacatgaacagcaggcaattcattgcgtactggttgatgaatgccagtttttaaccagacaacaagtatatgaattaagcgaggttgtcgatcaactcgatatacccgtactttgttatggtttacgtaccgattttcgaggtgaattatttattggcagccaatacttactggcatggtccgacaaactggttgaattaaaaaccatctgtttttgtggccgtaaagcaagcatggtgctgcgtcttgatcaagcaggcagaccttataacgaaggtgagcaggtggtaattggtggtaatgaacgatacgtttctgtatgccgtaaacactataaagaggcgttacaagtcgacagtttaacggctattcaggaaaggcatcgccacgattaataagaatttctttactgacagggtgagcagggcacttttatcctgtcagttcgttttacgcacttcttccgggctatatacccttctcggcagttttttaacgccgctatacgcctcacagggctcttaagcaccgacgttgacttgtgacctgtaaagtacaatatccctgtgtttaggcgttatacatcgtcgcaaatatgatgaaggctaatgctgtcggtttatggaaaagttgctttgggtaaacaaaaaatacggccccagaagggcaatgccgttcacttaagaggagcggcactatgtttcacaggataacgggtttttgatatcttaaccgacctcggccttgatggtcgggggcgttttgttatgaacaccacttccagagcaccccgaagatgctccagtcgtttcgggatggtccctggtgacgccgtgtttcccagctctatcatttctgatgcgatattcttccacgcaggcagtagccagtggcggttacaacccttctggttcagcgtcagcagcaggtcttcgctgtaaaaaagtttatcaaacaacgtaatagagttatccgggatggtggcgagcatggagtgggccagcacagtttcgctctgccggtaaggtgcggtcacggcattcagcagaatgtgacttcccaggttcattaaggccaccagacgcataaccgggtaggcgttctgccgcttagtggatgtgttggcagacccataatattcacgcagctcgggtttatcaggtgtcctgaactgtgcgccatcaatggcaaaaagttgcaggccgtgccagtcatccttcaggtaacgttccgcgcccctgtctgtgcggtctggcggaagagccattccactggggcggcccccacgcgctgacgcgcctgggtgacagcgctgcgggccagcaggttcatccccgcttcgccatccgcgctcaggttcagacggcgaacaacatcggtaattggctcattgcaccaccatccagataaccatgtcccccggtaaacgacggcggcgaacggtcgcatgagcagaaagcgtcaggcagtgttgtatccactcggtgggaaggtgttctgcaaatagttgtgcagagggcggaggcataagcggatggtcactgaaatcgagcagatcattgagaagtggcataagaaaacggctccctgttgtggaagccgttatagtgcctcagtttaaggatcggtcaactaatccttaactgatcggcattgcccagaaggggccgtttatgttgccagacagcgctactgattaagcggattttttcgcttttttctcagctttagccggagcagcttctttcttcgctgcagtttcaccttctacataatcacgaccgtagtaggtatccagcagaatctgtttcagctcggagatcagcgggtaacgcgggttagcgccggtgcactggtcatcgaatgcatcttcagacagtttatccacgttcgccaggaagtctgcttcctgaacgccagcttcacggatagatttcggaatacccagttcagctttcagcgtttccagccatgccagcagtttctcgatcttagcagcagtacggtcgcccggtgcgctcagacccaagtggtcggcaatttcagcataacgacggcgagcctgcggacggtcatactggctgaatgcagtctgcttggtcgggttgtcgttcgcattgtagcgaataacgttacaaatcagcagggcgtttgccagaccgtgcggaatatggaactgggaacccagtttgtgcgccatactgtgacatacacccaggaaggcgttcgcaaacgcgatacccgcgatagtcgctgcactgtgaacacgttcacgcgctaccggatttttagacccttcgtggtaggacgctggcagatattctttcagcagtttcagtgcctgcagagcctgaccatcagagaactcagatgccagtacagaaacataagcttccatggcgtgagttactgcgtccagaccaccgaaagcacacagggacttcggcatgtccataaccaggttggcgtcgacaatcgccatatccggagtcagcgcatagtctgccagcggatatttctgaccagtagcgtcgtcagttacaaccgcaaacggagtgacttcagaacctgtaccagaagtggtggtgacagcgatcattttcgctttcacgcccattttcgggaacttgtagatacgtttacggatatccataaagcgcagcgccagctcttcgaagtgagtttccggatgttcgtacataacccacatgatcttcgcggcgtccatcggggaaccaccacccagcgcgataatcacgtctggtttgaaggagtttgccagttctgcacctttacgaacgatgctcagggtcgggtccgcttctacttcgaagaagacttcagtttcaacgcctgctgctttcagtacggaagtgatctgatcagcataaccattgttgaacaggaagcggtcagtcacgatgagcgcacgtttgtggccatcagtaatcacttcatccagcgcgattggcagggagccacggcggaagtagatagatttcggaagtttgtgccacaacatgttttcagctcgcttagcaacggttttcttgttgatcaggtgtttcggaccaacgttttcagagatggagttaccaccccaagaaccacaacccagagtcagggaaggtgcgagtttgaagttatacaggtcaccgataccaccctgagacgctggggtgttaatcaggatacgcgccgttttcattttctgaccgaagtaagaaacgcgagccggttggttatcctggtcagtgtacaggcaagaggtatgaccgataccgcccatagcaaccagtttctctgctttttctaccgcgtcttcgaaatctttagcgcggtacattgccagagtcggggacagtttttcatgtgcgaacggttcgctttcatcaacaacggtcacttcaccgatcagaatcttggtgttttctggtacagagaagcctgccagttcagcaattttataggctggctgaccaacgatagccgcgttcagcgcaccgtttttcaggataacatcctgaacagctttcagctctttaccctgcaacagatagccgccgtgggttgcaaaacgttcacgtacagcgtcataaacagagtcaacaacaacaacagactgttcagaagcacagattacgccgttgtcgaaggttttggacatcagtacagatgcaactgcacgtttgatatcagcagtttcatcgataacaactggagtgttgcccgcgcctacaccgatagctggtttaccggagctgtatgcggctttaaccatgcccggaccaccagtcgcgaggatcaggttgatgtctgggtggtgcatcagtgcgttagacagttcaacagaaggttgatcgatccagccgatcagatctttcggagcaccggcagcgatagcagcctgcagaacgatatcagccgctttgttggtggcatcttttgcacgcgggtgcggggagaagataatggcgttacgggtcttcagactgatcaggcttttgaagatagcagtactagtcgggttagtggtcggaacgataccgcaaataataccgattggttcagcgatagtgatggtaccaaaagtgtcgtcttcagacagaacaccacaggttttttcatctttataggcgttgtagatatattcagaagcaaagtggtttttgatcactttatcttcgacgatacccatgccggattcggcaacggccattttcgcgagtgggattcgagcatctgcagcagccagagcggcggcgcggaagattttgtctacttgctcttgagtgaaactggcatattcacgctgggctttttttacacgctctacgagtgcgttaagttcagcgacattagtaacagccataatgctctcctgataatgttaaacttttttagtaaatcatctgctcgaatacgagagtatagtcagtgcggtgatgatttgcttaacctatgaaaatcaaaagcttactcgcgctcacactcactgtgatttactaaaagagtttaaacattagagttattatctctaatgcgtcacttccaggtggcgtaagcaagattactcacttctgggtactgattacgtgatccaaatcaaatttttgcaaagctgacacctttcagcatcgcttttcgccattatagctaacagttaataaattgtagtatgatttggtggctacattagcatgttttgcacaactagataacaataacgaatgatagcaattttaagtagttaggaggtgaaaaatgctgtcaaaaggcgtattgtcagcgcgtcttttcaaccttatttatggctaacattatccggcttttgcttcggagctaaccgtgattcagaccttttttgattttcccgtttacttcaaatttttcatcgggttatttgcgctggtcaacccggtagggattattcccgtctttatcagcatgaccagttatcagacagcggcagcgcgaaacaaaactaaccttacagccaacctgtctgtggccattatcttgtggatcagcctttttctcggcgacacgattctacaactttttggtataagtattgatagcttccgtatcgccgggggtatcctggtggtgacaatagcgatgagcatgatcagcggcaagcttggcgaggataaacagaacaagcaagaaaaaagtgaaaccgcggtacgtgaaagcattggtgtggtgccactggcgttgccgttgatggcggggccaggggcgatcagttctaccatcgtctggggtacgcgttatcacagcattagctatctgtttggtttctttgtggctattgcattgttcgctttatgttgttggggattgttccgcatggcaccgtggctggtacgggttttacgccagaccggcatcaacgtgattacgcgtattatggggctattgctgatggcattggggattgaatttatcgttactggtattaaggggattttccccggcctgcttaattaattcctttcaaatgaaacggagctgccatgctccgtttacttcgtcattatttttactttgttcccgcgcagttatcaaaagcaaaaggaataggtaaaaatattcttctcaaattacagttagttataaggatttccttaactgcttctcctcaccatcatgttattttcgccacatcataatcctgggcttgctgaagaataattgaaatgatattattaattccactgcctttggtagaggaaagtgctaaataataatcaattgttaaattattgtgcatttcactactggaactgtaatcagaaaagatagacatgcttagccaatctctatttgattgaattgaaagatgtttgttaaggcatggatgcaagctatagattctgatacggtcaataaaagagaattgcttaacaattttgcaaaatgtattggcgagtaagaaccgcatttggtactttccgggcaaccgccagacgattctttattggtaatgagaataattaacaattaaagagcgtcgcgaaagaataatgtgtctcgacaggggagacacagtacgaatcgacataaggtgatcgtctgaatcaccagaataaataaagtcggtgatagtaatacgtaacgataaagtaacctgacagcagaaagtctccgagcctgtgcagggtcccaatccgggattacacatgctggttaataccagtaattataatgagggagtccaaaaaacaatgaccaacatcaccaagagaagtttagtagcagctggcgttctggctgcgctaatggcagggaatgtcgcgctggcagctgatgtacccgcaggcgtcacactggcggaaaaacaaacactggtacgtaacaatggtagtgaagttcagagtttagatccgcacaaaattgaaggtgttccggagtctaatatcagccgagacctgtttgaaggcttactggtcagcgatcttgacggtcatccagcacctggcgtcgctgaatcctgggataataaagacgcgaaagtctggaccttccatttgcgtaaagatgcgaaatggtctgatggcacgccagtcacagcacaagactttgtgtatagctggcaacgttctgttgatccgaacactgcttctccgtatgccagttatctgcaatatgggcatatcgccggtattgatgaaattcttgaagggaaaaaaccgattaccgatctcggcgtgaaagctattgatgatcacacattagaagtcaccttaagtgaacccgttccgtacttctataaattacttgttcacccaagtactagtccggtgccaaaagccgctatcgagaaattcggcgaaaaatggacccagcctggtaatatcgtcaccaacggtgcctataccttaaaagattgggtcgtaaacgaacgaatcgttcttgaacgcagcccgacctactggaacaacgcgaaaaccgttattaaccaggtaacctatttgcctattgcttctgaagttaccgatgtcaaccgctaccgtagtggtgaaatcgacatgacgaataacagcatgccgatcgaattgttccagaagctgaaaaaagagatcccggacgaagttcacgttgatccatacctgtgcacttactattacgaaattaacaaccagaaaccgccattcaacgatgtgcgtgtgcgtaccgcactgaaactaggtatggaccgcgatatcattgttaataaagtgaaagcgcagggcaacatgcccgcctatggttacactccaccgtatactgatggcgcaaaattgactcagccagaatggtttggctggagccaggaaaaacgtaacgaagaagcgaaaaaactgctggctgaagcgggttataccgcagacaaaccgttgaccatcaacctgttgtataacacctccgatctgcataaaaagctggcgattgctgcctctagtttgtggaagaaaaacattggtgtaaacgtcaaactggttaaccaggagtggaaaacgttcctcgacacccgtcaccagggtacttttgatgtggcccgtgcaggctggtgtgctgactacaacgaaccaacttccttcctgaacaccatgcttagcaacagcagcatgaataccgcgcattataagagcccggcctttgacagcattatggcggaaacgctgaaagtgactgacgaggcgcagcgcacagctctgtacactaaagcagaacaacagctggataaggatagcgccattgttcctgtttattactacgtgaatgcgcgtctggtgaaaccgtgggttggtggctataccggcaaagatccgctggataatacctatacccggaatatgtacattgtgaagcactaatggcaatacgtggggcaggagtgtcctgctccacggtgtctgatttttatcgcattacagaaggcacaggccagaaggtagggcaatgttaaaatttattctacgtcgctgtctggaagcgattccgacgctatttattcttattactattagcttctttatgatgcgcctcgcgccgggaagcccttttaccggcgaacgtactttaccgccagaagtgatggccaatatcgaagcgaaatatcatcttaatgatccgatcatgacacagtatttcagctacctgaaacaactggcgcacggtgatttcggtccaagctttaaatataaagattatagcgtcaatgacttggttgcatccagttttcccgtttctgccaaactgggagccgcagcatttttccttgcggtaatactgggtgttagtgctggcgttattgccgcattaaaacaaaacaccaaatgggactataccgtgatggggctggcaatgaccggggttgttatccccagttttgtggttgcaccattattagtcatgatatttgcgatcattttgcattggctgccgggcggtggctggaatggtggggcgcttaaattcatgatattgccgatggtggcgttgagtctcgcttatatcgccagtattgcgcgtattacccgtggctctatgattgaagtattacactccaattttattcgtactgcccgggcgaaagggttacctatgcggcggatcattttacgtcacgcattaaaacctgctctgttacccgtgctctcttatatgggccccgcatttgtcggcattattaccggttctatggttatcgaaaccatttatggtttgccggggattggacaactgttcgttaatggcgcattgaaccgtgactattccttagtgttaagcctgaccatcctggttggtgctttaaccattttgtttaatgccattgtcgatgtgctatatgcggttatcgacccgaaaatccgttactgatactggagctcgcgatgatgttaagtaagaaaaacagcgagacgctggaaaatttcagtgaaaagctggaggtcgaagggcgcagcttgtggcaggacgcacgtcgacgttttatgcataaccgtgcggcggttgccagtctgatagtgctggtgctgatcgcgttatttgtaatcctggcaccgatgctttcccagtttgcctatgacgatactgactgggcgatgatgtccagcgccccggatatggagtccggtcactactttggtactgacagttccggtcgcgacctgcttgtgcgcgttgcgattggcgggcgtatcagtctcatggtcggtgttgctgcggcactggtggctgtggtcgtcgggacactttatggtagcctttccggttatctgggcggtaaagtggatagcgtaatgatgcgtctgctggaaatcctcaactccttcccattcatgttcttcgtcattttgctggtgacctttttcggtcaaaacatcctgctgattttcgtggcgataggcatggtttcctggctggatatggctcgtattgtgcgtgggcaaaccctgagtctgaagcgcaaagagtttattgaggcggcacaagttggcggtgtaagcacaagcggcattgttattcgccacattgtgccgaatgtactcggtgtggtggtggtctacgcaagtcttctggtgcccagcatgatcctctttgaatctttccttagcttcctggggttgggtacgcaagagccgttaagcagctggggtgcattgctgagtgatggcgcgaacagcatggaagtctctccatggttattgttgttcccagcgggattcctcgtggtgacgctgttttgtttcaactttatcggcgatggcttgcgtgatgccctcgacccgaaagatcgttaaggagtgcagccatgagcgtaattgaaactgcaactgtgccgctcgcacaacaacaggctgacgcactgctgaacgtgaaagatttgcgtgtcacctttagtaccccggacggcgacgtcacggcggtcaatgatttgaatttttccctacgtgccggagaaacgctgggtattgtaggtgagtctggtagcggtaaaagccaaactgcatttgcgttgatgggcctgttggctgccaacggacgtattggcggaagcgcaaccttcaatgggcgtgaaatcctcaatttgccagagcatgaactcaataaactgcgcgctgaacaaatcagtatgatttttcaggacccaatgactagcttgaatccctatatgcgcgtcggtgagcagttgatggaagtgctgatgctgcataagaacatgagcaaagctgaggcgtttgaagagagcgtgcggatgctcgatgcggtaaaaatgccggaagcgcgtaaacgcatgaaaatgtacccgcacgaattttctggcggcatgcgtcagcgagtcatgattgcgatggccttgttatgtcgacctaagctgctgattgcggatgaaccaacaactgcgctggacgtcaccgtacaggcgcagatcatgacgctattaaatgaactgaagcgggaatttaataccgccatcattatgatcacccacgatcttgtcgtggtggcggggatctgcgacaaagtgctggtaatgtacgccgggcgcacgatggaatatggcaacgcgcgcgatgtcttttatcaacccgttcatccttattctatcggtttgctcaacgcggtgccgcgtctcgatgcggaaggtgaaacaatgttgaccatcccgggtaatccgccaaacctgctgcgattaccgaaaggttgcccgttccagccacgttgtccgcatgcgatggaaatttgtagtagcgcaccgccgctggaagagtttacgcctggccgtctgcgtgcttgctttaaaccggtggaggaactgttatgaatgctgtaactgaaggaagaaaagtcctccttgaaatcgccgatcttaaagtgcactttgaaatcaaagatggcaaacagtggttctggcaaccgccgaaaacgctcaaagccgtcgatggtgtcactcttcgcctgtatgaaggggaaacattaggtgtggtaggggaaagcggatgcggtaagtccacctttgctcgcgccatcatcggtttggtcaaggcgaccgacggtcatgttgcctggttaggtaaagagttgctgggcatgaaacccgatgaatggcgtgccgttcgcagtgatattcagatgattttccaggatccgttggcaagcctaaacccgcgtatgaccatcggcgagatcatcgctgaaccactgcgtacttatcatccgaaaatgagtcgccaggaagttcgcgagcgcgtgaaggcgatgatgctgaaagtcgggttattgcctaacctgattaaccgctatccgcatgagttctctggtgggcagtgccagcgtatcgggattgcgcgtgctcttattcttgaaccgaagctgattatctgtgatgagccggtgagcgcgctggacgtgagtattcaggcacaggtggtcaacctgctccagcaattgcaacgtgagatgggattgagtttaatttttatcgctcatgacctggccgtggtaaaacacatttccgatcgtgtgttggtgatgtatctcggccatgcggtagaactggggacctatgatgaggtctaccacaatccactacatccttacaccagggcattgatgagcgcagtccccatacctgatccggatctggagaagaacaaaaccatccagttactggaaggggaattaccgagcccgatcaacccgccttccggttgtgttttccgtacccgttgcccgattgccggtccagagtgcgccaaaacacgtcctgttctggaggggagtttcagacactccgtttcttgcctgaaagtcgatccgctttaaaaacaataagggctgacagttgtcagccctttttcacgctaaaagcgattatttattcccgccagatgatatggcaaagtttgtgatctttttcgcggcataacagaatgcgggcaaaaacatcgttgatttcaccatcttcactgtccgccagaccaatcaccacttcggcaaaaaagtccgggttcaaatcgaaatcaacatgttcctgccagtcttccgccggatcgaataactccgcgccgccgcgctcttcaaactgaagattgaacagcagaacatcagctggatcgagattgtcggcagccagttcgagaaaaatatcgtaggcctgttcaagcgtttcatcttcagtcaggcgattgtttagatccatatccatagttactacctgtttaacctctgttggcgacgttttacagcaacggactgaagaagtaaaacagtcgctcggcgacacgttgccataatggacgttttagccataaacgggcatcgagcagacgactacggctaatataatcgtcctgaacggcggcgaggtcagcaccaaaacctttatcgtcgattgccagggtaatctcgaaatttagccacagactacgcatatcaaggttaactgtgccaaccagacttagttcgccatcgaccagcacgctcttggtatgcagtaacccgccttcaaactgataaattttaaccccagcagccagcagttccgtaaagaatgcgcgactggcccagccgaccagcatgctgtcattttttcgcggaaggataatactgacatccaccccgcgctgcgccgccgtgcaaatcgcatgaagtaaatcatcgcttggcacaaagtagggcgtggtcatgatcaaatattcacgcgcgctataagccgcagtcaataatgcctggtgaatgagatcttccggaaagccggggccagaagcaattgtgtgaatggtgtgaccgctggcctgttcaaacggcataatattgacatctggtggtggcggcagaatacgttttccggtttcaatctcccagtcgcaggaataaataatccccatcgcggtggcgatagggccttccatacgcgccatcagatcaatccattgccctacgcccgcatcttgtttgaagtagcgaggatcgaccatattcatgctgccggtgtacgcgatgtaattatcgatcatgatcatcttgcgatgttggcgcaggtccatacggcgtaaaaacacacgcatcagattgacctttaaggcttcgaccacttcaataccggcattacgcattagctcgggccacgggctgcggaaaaaagccacactcccggcggagtcgagcatcaatcggcaatgaatgccgcgtcgcgcagccgccattaaactttcagccacctggtccgccatgccgccgggctgccagatataaaacaccatctcaatattatggcgcgcgagctggatgtcgcggattaacgcctgcatcacatcatcactctcggtcatcagttgtagctgattccctttgaccccagcgatcccctgacgacgctcgcaaagcttgaataatggcgcagcgacactgctattttcttcggcgaagatatgcttacaggctttaaggtcgttaagccattttgcggtggaaggccacatcgctctggcgcgctcagcgcggcgtttgcctaaatggagctcgccaacggcaagataggcaataattccgactaacggcagaatgtaaataatcaacagccaggccatcgcggagggaactgcgcgtcgtttcattagaatgcgtaaagttacgcctgcaatgagcaaccagtatcccagaatggccaaccaactcaccaacgtataaacggttgtcatagattagaaatccttttgaaagcgcattgttatgagtttacgcatatggattcatctggcaaataaaaacgcgggaaaagcactggtcagcgtcgggggtgggggtataatgaccattctgttattgcatagagtagttaacatgaagcggagtagaacggaagtggggcgctggcgcatgcagcgtcaggctagccgacgtaaatcgcgttggcttgaggggcaatcgcgccgaaatatgcgtatccacagcatcaggaagtgcattctaaacaaacagcgtaactcgttattgtttgcgatctacaatatctaaatgtactgggcaccattgcggtgcccaataagtttactcttccgtctttaaactttatttttgcgcgctttctttactgtcagctttcgtttctagttcatcgttatcgctgaaaataccatgaccactgttcaacaacatactaacgagcatatcattattaatctcttcaccatttaaaactcgcgccagaatttcgctgccaaacagttgcggactgagaatgatatccggatgtaccatcttaatcttattcaggtttttgctatcactgacggcgagaactgttttgacatcactgctcatatcttttgcgctgagtacaacaaacgcgttatctgcatcgttatcactcagcgccagaatggcccggcaacgatcgattcccgctttctttaatacagaactgtcattactgtcaccggggataacatcagcattatcgcctaagcgttgctcaagttgcttgatatcatcttcaggcaagttgctgataaccgttacgttttgtccgcgttgattcagttgcaggatcgtattgatggcgagaatgctatgtccgcaaacaataaaatgatctttacgatgcattgtatgattgtttccttttacaagtttgttgaatcccccgcggataagcggaccaaaaatactggtcatagatgtggcaaaaacggtaatgccggaaataatgacgctaatagtgaacaatcgtgcactttcagaaacagggacaatatcgccatagccgacggtactcatggtttctatgctaaaatagaacgcggtcatcaaactttctattcgcggattaaaaccttcgcttaaataaagcgcaccgtaggtactgtaaaacagtaatgtcgtgaaactaataaatgcaaaaattgtcccggctgcggcgctactgtgggagaagtctttgcgcagtatcagcaaaaacaccagcgtaaaaatgcaaaatccaatactaaatttcagccagggataaaaatgcagggtgtaaattagcgctatcaacaacaaaatgatactgattgcccatgcgagctttgcccggaacagtaagccaatggagttcaggacaagaaagacgccgagcataaagagtggggcgtttgccagcaaggagagatccaactcactaaatgctttgatatggaaaatatcaagcaaattgacgctcataccatagattgttttaaaaataagcaatccatttaaaaagacggccagcgcgagaatgtcgtgccgaagggtcacccataaatttgttgctgtttgtttgaatgtagcccagtgactcactgatacctctgtaaccacaattttgtttaattatcttagcgtgcacattttctgaacatacatgcagcgcgtgaatgtgttaaacaatagtagatgactttatccgcagtaatcaaaggatttgagcgagcaactgtacctcaggaaaggtcatttttcctgaatatgctcacatcatataaagaaatacagataaagttattatctgcttgtggtggtgaatgcactgaccggctataaggaaaggccaaacaagaacacggttgcaaaaaccgtgcccttaaatattgaatctctattcagaacactttcttaaatggtttcacactaacgtgttcatagactcctgccgctacgtacgggtcagcatcggcccaggcctgagctgcttccaggctttcaaattcagcaataacggtactgccagtaaatcccgcagcccctggatcgttactgtctaccgctggcattggaccagctgtcaacaaacgaccttcatcatgcagtaactgtaaacgtgctaaatgtgccggacgaacggaaaggcgtttttcgaggctatcagctttgtcttgagcgtaaataacatacaacacgggcacaactccttgttcgggaaagttgtaaagtacgttatttgaaagggcgaagatctgcaacggaaagatgatgtctttgttaaggccatgcataaagtaagggtaattacgccaaaaatgacattttcactgatcctgatcgtcttgccttattgaatatgattgctatttgcatttaaaatcgagacctggtttttctactgaaatgattatgacttcaatgacccttgatttacctcgccgcttcccctggccgacgttacttagcgtctgcattcatggtgctgttgtggcgggtctgctctataccagcgtacatcaggttattgaactacctgcgcctgcgcagccgatttctgtcacgatggttacgcctgctgatctcgaaccgccacaagccgttcagccgccaccggagccggtggtagagccagaaccggaacctgagccgatccccgaaccgccaaaagaagcaccggtggtcattgaaaagccgaagccgaaacctaagccaaaaccgaagccggtgaaaaaggtacaggagcagccaaaacgcgatgtcaaacccgtagagagccgtccggcaagtccgtttgaaaatacggcaccggcacgcctgacaagtagtacagcaacggctgcaaccagcaagccggttaccagtgtggctagtggaccacgcgcattaagccgtaatcagccgcagtatccggcacgagcacaggcattgcgcattgaagggcaggttaaagttaaatttgacgttacgccggatggtcgcgtggataacgtacaaatcctcagtgccaagcctgcgaacatgtttgagcgtgaggtgaaaaatgcgatgcgcagatggcgttatgagccgggtaagccaggcagtgggattgtggtgaatatcctgtttaaaattaacggcaccaccgaaattcagtaagcagaaagtcaaaagcctccgaccggaggcttttgactattactcaacaggtaaggcgcgaggttttccttcaggatcaaccgcgacatacttaaataatgcttctgtcgctttatagcgttgcccaattggttcagacgctacttttttcacccacacttcaatattaatgctgacgcttgtcgtccctttctggacacagcgtgcatagcagcacaccacatcgccgaccgcaaccggccgtaagaaagtcattccttcaacccgcacagtcactacgcgaccgtgggcaatttcttttgccagaatagcgccgccaatatccatttgactcattaaccaaccaccaaagatgtcaccattggcattggtatcggcgggcatggctaaagtacgtaaaacaagatcgccctgagggacgttatgtgttgtagacatggtaaaaccgacttaaaaggaaaatcacaggcgcgatgctactatgattttcctgaggagaacagaggagatacagcgccagccccgaaggactggcagtctggttaggatttatcttcctgcggcatgtggcggtagatatagataccgcttaacaatgtgaagattaaggtaagggcggtcaggccaaagactttaaagttgacccaaatattttgcggcagccagaatgcgatgtagatgtttgccagaccgcaaaggataaagaaaacagcccaggccagattcagcttgctccataccggttgcggcagcgtgagttctttacccagcatccgctgaattagcggctttttcatcacccattggctgactaacagggctcccgcaaatagagcataaatgacagtaaccttccatttaataaactcatcattgtggaagaacagcgtcaagccaccgaagacgaccaccagaacaaaagtgatcagggccatcttctcaaccttacgaaagcgaacccagctatagataagcacaatcgccgtggcgacgatcagcgccgcagtagccgcatagatgtcataaatcttgtaaaacgcgaaaaagacaaccagcggtaaaaaatcaagaaactgcttcattttacgattccgtaatcaaatgcttaaggttattggcgaatcaacatatacaggcggaacagatagatgagcaatatggcactaatcaggttgctcaaggtgttcgccagtacggcaccaatttccggggttaatgcggcaaaagaagaggcaaaaagcagcaacagtgtttttgccagcaaccagctcagtactgcgggtgccaccagacgcatattcgcccaagtcagccgcatactgctacgcatgctggcaaaaacgcccattttgtcctgtaccaacatcaccggtgccagggccagtaaaatggccatgataattcccggaacgaccaccagcatgatgccaatctgtactaaaagggtagtcagaaaaatcagaataaataactttggcaatatcggcgcactggcaccaatagctcgcagcgcactgactctctgacccgcagacaccagctggataattaatattacgcctccggcgagaatggcgttaccgattaatccactaaaagtggacgccgcactagcctgcagcaaaatttgttgctgttccggactcatattctgaaccaggtcgaacaacccactactgccgctaacgggcacgccgtcattgagctgcgcaagctgtgcatcactgggactgaaaacatgccctaacaccactgtgataaacgcacatagcaagcttaccaacagaatggtcataaattgattacggaagaaatttccggtgtcacggtatacggactgcgccgtgatagacatgcactctccttgagttttatgcaggtgttaattagcgggcaattgtaccctggttaagcctcgggtggcagcatcaggtcttgtatggaaaagcatatctttgtaaagcggaggtaattgctggccttcaggcatgggcaaatcgcggcaagtggcgaccgagttaatatttgcgtagcgaaaatatttaaaaattgatttaaatcacattaaccaggattctcaatgcaacttctaaattaatccagatcaataaagggtgaattatcatatgtaatgtgatctatgtaggatcatttgttactccaatgtaggtatattcgtcacgtttttataaccataacgacggagcggatatgaaaaagttaacagtggcggctttggcagtaacaactcttctctctggcagtgcctttgcgcatgaagcaggcgaattttttatgcgtgcaggttctgcaaccgtacgtccaacagaaggtgctggtggtacgttaggaagtctgggtggattcagcgtgaccaataacacgcaactgggccttacgtttacttatatggcgaccgacaacattggtgtggaattactggcagcgacgccgttccgccataaaatcggcacccgggcgaccggcgatattgcaaccgttcatcatctgccaccaacactgatggcgcagtggtattttggtgatgccagcagcaaattccgtccttacgttggggcaggtattaactacaccaccttctttgataatggatttaacgatcatggcaaagaggcagggctttccgatctcagtctgaaagattcctggggagctgccgggcaggtgggggttgattatctgattaaccgtgactggttggttaacatgagtgtgtggtacatggatatcgataccaccgccaattataagctgggcggtgcacagcaacacgatagcgtacgcctcgatccgtgggtgtttatgttcagtgcaggatatcgtttttaattccgcacaaaaacgaccccgtaatatacggggtcaataaggacatggtataaagggtattatttcttcgcttctacgccatcagtttcagagcgaattaaaaatttctcagttgtttgcggaatattctgaatcagccagtcggccatttgcttttcctcatttaaaatcgcttcgatggttggaatactagctgtatcaccggcattttttgctgctgctaatagactggtgtaacaggcgatttcaaattgctcgaagacatatccgctaatagagcctttgactatttcatcagaagggaatataccaccgatactctgcccaagcgcagccattttactcatggaatctttaatgacactacgactaatgtcattacgatcaagaatagtttccagttgaacaatctggtttttggtttcactaagatgttgttcaatacgagcgcgtagttcaggataattatctatacggctggccatggattcaagcatagattcggcttgcttttccattgcgtgggcgtcacgtaaccagtcatgataatgttcaatacgattcatgaaaatgtcctctttataaaatgactaaaagttaaaattcatatttcaggctttattttcggctttcttatttacgttattaatggccagatcagtcagtttgatgtcggtggccttttcttcttccagggtttctttcagaagcttcgctgctttacggtaacctaattgttcagccagcgtcgctaatgtcccgtaactggcaatctcataatgctcgactttctgtgctgcggcaatcagtgcggcatcacgcacttcgtttttctcggtactttcgatgacctcattagcttcttcaataagaccttccattgccacacatttcatgcgcttaattttcaggttgctttcggactccacaacttgatcaatacgttcaatctgtccatgagtttcctcgaggtgcgcatgaaaagcctgacttaatttttcattacttgttgctcttgcgagttttgccagtgcccgggttaattgtttttctgcgctgtaggtatcactaagcaggtgaataaatacatcttcaatggtcttcatattcatatttttctccagtgaaatcactgcgagccatacggcccgcagatgcaattatctttatcagctgatattaataattaacggtgaatcaggatttgccacttttattaccaccgctttgttgaccgccttttttacccgcttcagatgcgcgttgcggatcatttttaaaattaccgccgctatgctgaccgcctttacggcctgcgtcggatgccttctcacggtcttcggcgaaatttccactaccaccacgatgttcggccatgttatttctcccgttgcgttgcattgtttcattaatatgagtgttgtgtgtcgacactcattaaaattagtcgctaatgagaattagtcaaattaagcgcaacgagaagatagagggaaaatatattttgaggaacattctggatatattaacaattacctgaggaataagtgacttagagaaaattattgattttactggtgttatgttgcgggattaatttgtttgattatattactgttgggcggaaaaatgacgtaagttgacgttcgaccggggtaagcgaaacggtaaaaagataaatattaaatgaatttaggatttttccggcttcattaaagaaagttaaaatgccgccagcggaactggcggctgtgggattaactgcgcgtcgccgctttcatcggttgtacaaaaactttcagtgccgccagcattttctctggctcattaatatgttgctcgatgattttaacaatggcgctaccagaaatcgcgcccgcagctcctgcatcaatcgctgcttttacctgatccggggcggaaataccaaatccctgcaatggaggtgcagcgttgtactctttcagcttcgcaaccagatgattgaggggtaacgcggcgcggttttctgcgccggtcacgcctgctcgactcagcaaataggtgtaaccacgaccgtaagaggctatctggcgcagcaggtcgtcatcggcatttggcgggcagatgaagataggtgcgacattatgacgcaacgcggcctggcggaagggcgcggactcttcaactggcacatcggcaaccagcacgctatcgacgccgactttttcgcactgggcataaaactcatcaatgcctttgttaaacaccagattggcatacatcaacaggccaatgggaatggtcgggtgtttctggcgaatcagtgccagcatttcaaaacattgtgccggagtcacacctgccgcaaaggcgcgcagagtggcgttttgaatcgtcgggccatccgccagtgggtcggagaaggggatacctaactccagcgcgtcagcaccggcttcaattagcgtatcgataattttcaaactctgctcaatgcccggatcaccgagcgtgacgaaaggaacgaatgcgccttctttgcgctccttcaactgggcaaacagagattcgtagcgttccatcagatttcccctcgtgctttcaaaatatcgtgaacggtgaagatgtctttatcgccgcgaccggaaaggttaaccaccagtagctgctctttatccgggttttcgcgcatcattttcaacgcatgggccagggcgtgggaggattccagcgccgggatgatcccttcgtgcaggcacagcgttttgaaggcttcaagggcttcatcatcggtaatagacacgtaatcagcgcgtccagtgctgttaagatacgcgtgttgtgggccgacagacgggaaatccagtccggcggagatggagtaagattcttcaatctgcccgtcttcggtttgcatcatcggcgctttcataccgaaatagatacccacgcgaccatgttttagcggtgcgccgtgctcgccagtttcgataccgtgaccacctggctccacaccaatcaggccgacgttggtttcattgatgaaatcagcaaacatgccgatggcattgctaccgccgccaacacaggcgataacggcatccggcaggcgaccttctctttccagaatctgcgctttggtttcttcgccaatcatccgctgaaactcacgcacaatggtcggataaggatgcgggccagctgcggtgcccagcatatagtgcgcggtttcgtaactaccggaccagtcgcgcagcgcctcgttacaggcatctttcagcgtcgcggaaccgctatgcaccgggatcacttccgcacccattaagcgcatacgaaaaacgttagggctctggcgttcaacgtctttggcacccatataaatacggcatttcaggccgagcagggcgctggcaagggcgctcgccacgccatgctgaccggcaccggtttcggcgatgatttcggttttacccatccgcttcgccagcaacgcctgccccagcacctggttagttttatgcgcgccgccgtgcagcaaatcttcacgcttgagatacagcgtggtgttcgtcccggctgtaatgttctggcatttggtcagcgcggttggacgcccggcatagtttttcagcaggtcgttgaactgagcctgaaattcaggatctttttgcgcactgacaaaagcttcttccagctggcgcagagcaggcatcaggatttgtggcacgtacatgccgccaaactcaccaaaataggggttaagtaatgttgtcattgttcctttccttaatatgcgcgcagcgtctggaaaacgctggccaaaagacgtgcgtctttgatgcccggttggctctctacagcagaattaaaatcaagtccggcgcagccggtttgtgccgcttccacgcagttatctgcgcctaagccccccgccagcagaacgttgccaaggctttgaccatttaatagactccagtcaaaacgttgcccgcttccaccctggccgttgtctaaaacatatttatcaacgtgctgaaactcgcgggcgggcagggtttcaccgacgcttaatgctttccagatggcaacatgtgctggcagagcttcacgcagcgtatcgatatacagctgttcttcattaccatgcagttgcactgccgccaggcttaacaccttagctttgtccaccacatcggcaatatcgtgattgcggaacacgccaacatactgcaacggtgccgcagccatcacttcctgcgcctgttcaacgttgacgcaacgcggacttgtcgcaacaaaaatcaacccaccgtaaatcgcgcccgcgtcataagctgctttagcatcttgcccacgcgtcaggccacatactttattctcacccagcaacacccggcgcacggcggcgtgcaaatcgtcatgggccatcaacgcgctaccaatcagaaaaccgttagcgaagtggcttaactcgcgcacctgagcgtaagtattgatgccggattcgctgattaccgtcacgttgtgccccagtttcggcgcaagctcgcgggtacggttgagatcaatgctcaaatcacgcagatcgcggttgttgatgccaacgacctttgctcccaatgcaatggcgcgctcctgttcctcttcattactgacttcggtcagcacccccatctccagactgtgagcgacggcggcaagctggcgatattggtcgtcatccagtacactaagcattaataagcaggcatcggcctggtaatagcgcgccagatagatctggtaagggtcgataatgaagtctttacataaaatcggctgcggggcgatttggctgacgatggggaggaaattaaagctcccctgaaaatatttctcatcagtcagcacgctaattgcgctagcgtaatgtttataaatggcggcaatgcgtgctggatcgaaatcatcacggatcacgcctttactcgggctcgctttcttgcactccagaataaacgccgtgcgcgcaccctgtagcgcatcataaaaatgtcgcgtgctcggctgaacctcattctgaaaactggccagcggttgctgctgtttgcgggcttctacccaaatcgccttgtctgcgacgattttcgctaaaacggtttgcatcatttaccctcgtgccgccagtgcggtgactctgtcgtaagcggaaccactgcgcagtacctcaagaacggtttgcgcattggcttgcagatcttcatggccatgcaggcgcattaacatggcgacgttcgcagcgacggctgcttcatgggcggcgtcgcctttaccttgtaacaaacgtgttaaaatgtcacggttttcttccggtgttccgcctgccagttgctcctggtggtagggtgtcaggccaaagtcttctgcggtgagctgatagcttttaatttcgccgtcatgcagttcggcaacgattgtcggcgcgtgtaaactaacttcatccatcccgccgctgtgcaccaccgccgcgcgttgataccccagcacgcgcaaggtttcggcaatcggcagcaccagttccggactataaacaccaattaacgccagcggcggatgcgccgggttaatcaatggccccagcacattgaacagggtgcgggttttcagttgctggcgaaccggcatcgcgtggcggaatccggtgtgatacttcggcgcaaagaggaaacatacacctaactcatccagcgcctggcggcttttatcggcgttcatatcaagattaataccgaacgccgccagcagatcggagctaccagatttactggagacgctacggttgccgtgtttcgccactttcagcccacaggccgcggcgacaaacgcactggcggtagaaatattgatactgttgctgccgtcaccgccagtaccgacgatatcagcaaacagataatccgggcgcgggaacggcgctgcgttttccagtagcgcggttgctgccccggcgatctcgttcgggtgctcaccgcgaattttcatgctcaccagcgccgccgccagttgttccggcttcagctcgccacgcaccaccgcactaaacagctggtggctttcttgttggctaagcgtctgcgcctgatacagtttttccagaatcggttgcagcgtgttggctggctctagtttctgctgcgcccaggccagcgtttgttccagcaggcgagcgccctgggtggtgagaatggattccggatggaactggaatccacaaacgcgatccgcatcgtgacgtactgccatcaccatgccattaaaatgggcgttgatggttaaaccggccggaatgttactgccaaccaggctgtgataacgcgccaccggcagcgggtttgttaatccggcaaacatcgcctgaccgtcatgttcaatgctggaggctttaccgtggagaatttcgcccgcctgaccgacatagcccccgtaagcttcgacaatcgcctgatgtccgaggcaaatgccaataatgggcagcttgccacgcaagcgggtgaggagttccggcatacaaccggcttcgctcggcacaccggggccaggagaaagcatcagcaccggattgctcatggtcgccaggcgttcaattaaggtttgcgccggaatatggttgcggtaaatcaccacgttatgcccattgctgcgcaactgatctgccaggttgtacgtaaaagagtcgatattatcgagcagcagaatgtcagccatcagaaagtctcctgtgcatgatgcgcggtggcaatagcgcgcagtacagcgcgggctttgttacgggtttcgtcggcttcgctctgcggaacagaatcaaggactacaccagcacccgcttgcacggtggcgataccgttttccaccagcgcgctgcggatcacaatgcaggtgtcgagatcgccatgcgcggtgaaataacctaccgcgccgccgtagctgccgcggcgacgaccttccgcctcggcaattaactgcatagcgcgtactttcggcgcaccgcttaacgtccccatattcatacaggcgcgataagcgtgcagggcgtcaagatcgtgacgcagttcgccgactacgcgagagacgaggtgcatcacataggaataacggtcaactttggtgagatcggcgacgtagcggctgccgggggtgcaaatgcgtgccagatcattacgggcgagatcaaccagcatcagatgttcagacagctctttatgatcggtacgcatttccagttcaatacggctgtcgagatctctgtccagactaccatcggcgcgacgaccgcgtgggcgtgttccggcaatcgggtagatctcaatctggcggctggtggcatcatacttgaggctgctttccgggctcgcgccaaatagggtgaaatcattatcctgcataaaaaacatgtacgggctgggattactctttttcagcacgtaataggccgccagcggactcgggcagggcagagagaaacggcgagatggcaccacctggaaaatttctccagcgcgaatcgctttttgcaacaaacgcactacgccaccgaactcttcatcgctctgattacattcacaacgcatatgcggcacggaaaccactggcagcggcggcgcggcttcggtcagttgctgacgtagttcgttcaggcgagcagtgagacgttgtttttcttcttcattcggagcaaacaggctggcctgaatacgggtgctttttttctgatggtcaatcaccatcagcgtttcagcgagataaaaacagaaatcagggcagttattttccgcactcagttgcggtaaatcttcaaatcccgccacaaggtcataagagaacaggccgccgaagaacatggcttctcgttcttccttcggtacattcaacagattctgcaataaacggaaagcgtcaaaaacgctaagggagcataagcgggcgtcttcatccagcagtggactgacaggggggaagcgcagcacacggcagtttggactttgttcactttccacacccgcaggcagggcgttatccagtagtgccaggagggcttcgccgttgccggaaagtgcctggattgtgacagtgtcacctaaagctgtaatgcgcagcgcactgtctaccagcagcaggctttttaaatcatctttgctgtcgatatctgcggattccagcagcagcgttgccggacgatccccacacaactggtgaaaaagcgcggtgggattgtcgcgataagcgccttcgcaggttagcagttcgagagtcggtttttgtgtttgcattgttattctctaattttgttcaaaaaaaagcccgctcattaggcgggctgggtatctgattgctttacgcatggtgaatacactgcccgtttcaggaagtgcgccaccaacctttcagtacgaaaattgctttcattgtcgataccctttttacgtgaacttgcgtactagttaactagttcgatgattaattgtcaacagctcatttcagaatatttgccagaaccgttatgatgtcggcgcaaaaaacattatccagaacgggagtgcgccttgagcgacacgaattatgcagtgatttacgacctgcacagccataccacagcttccgatggctgcctgacgccagaagcattggtgcaccgtgcagtcgagatgcgcgtcggcaccctggcgatcaccgaccatgacaccacagctgcaatcgcgccagcaagagaggaaattagtcgtagcggactggcgttgaatcttattcccggcgtggaaatttccacggtctgggaaaatcatgaaattcatattgtcgggctgaatattgatattactcatccgctaatgtgtgagttcctcgcgcagcagacagaacggcgcaatcagcgggcgcagctgattgccgaaagacttgaaaaagcgcaaatacctggggcgctggaaggcgcacaacgactggcgcagggcggcgcagtgacgcgcggtcattttgcgcgtttccttgttgagtgcggcaaagccagtagtatggcggatgtctttaaaaagtatctggcgcgcgggaaaaccggatacgttccgccacagtggtgtacaatagaacaagctattgatgtcattcatcattctggcggtaaggcggtgctagctcatcctgggcggtacaatcttagtgctaaatggctgaaaagattggttgcgcattttgccgaacaccacggtgacgcgatggaagtcgcgcagtgccagcaaagccccaatgaacgtacccagctggcggcccttgcgcgtcagcatcatttatgggcaagtcaaggatctgattttcatcagccatgcccgtggatcgaactgggtcgtaaactctggctgcccgcaggcgttgaaggcgtctggcagctatgggaacagccgcagaacaccacagagagggaattatgagccagtttttttatattcatcctgataacccacagcaacgtctgatcaaccaggcggtggagatcgtgcgtaaaggcggggtgattgtttatccaactgattccggctatgcgctcggctgtaaaattgaagataaaaacgcgatggagcgtatttgtcgtattcgccagctgccggacggtcacaactttaccctgatgtgtcgcgatctttctgaactcagcacctatagttttgttgataacgttgcgtttcgtttaatgaaaaacaacacgccgggcaactataccttcatcctgaaggggacgaaggaagtgccacgccgtctgttgcaggaaaaacgcaaaaccatcggtatgcgtgtgccttctaaccctatcgctcaggcgttacttgaagcattgggcgaaccgatgctttccactagcctaatgctgccaggcagcgaatttaccgaaagcgacccggaagaaattaaagatcgtctggaaaaacaggtagatttgattattcacggcggctatctcgggcagaaaccgacaacggttattgatcttaccgatgatacgccggtcgtggtgcgtgaaggcgtaggtgatgtgaagcctttcttataacaaattgcgttccacggatggaagactatggcagggaagtttcgctgcattttgctgttgatagcagggctgtttgtaagttctctaagttatgcagaaaacacggagatcccttcttatgaagaagggatcagcctctttgatgttgaagccactctgcaaccagatggggtgctcgacatcaaagaaaatattcattttcaggcgcgaaatcagcagattaagcacggcttttatcgtgatttaccacgactatggatgcagcctgatggggacgctgcactgctgaactatcatattgttggcgtcacccgtgatggtattcctgaaccctggcatcttgactggcatatcgggttaatgagtattgtcgtgggcgataaacaacgtttcttgcctcaaggcgactatcattatcaaattcattatcaggttaaaaatgctttcctgcgtgagggggattctgatctgctaatctggaacgtgaccggtaaccactggccgtttgaaatttataagacccgtttttctctccagttctctaatattgcgggtaatccatttagcgaaatcgatctttttaccggagaagagggcgacacatatcgtaatggccgcatccttgaggacggaagaattgaatcccgcgatccgttttatcgtgaagatttcacggtcctctaccgctggcctcacgctttacttagcaatgccagcgctccgcaaacgacgaatattttcagccatcttcttttaccctccacgagtagcttgttaatttggtttccgtgtctgttcctggtttgtggatggttatatctctggaagcgcaggccgcaatttacgccggtagatgtgattgaaaccgatgtcattccgccagattacacgcccggcatgttacgtctcgatgcgaagctagtttacgacgataaaggtttttgtgccgatatcgtaaatctgattgtgaaaggaaaaattcatctggaagatcagtctgacaagaaccagcaaatcctgattcgtgttaatgaaggcgcgaccagaaataatgcggtattactgcccgcagagcagttattactggaagcgttatttcgtaaaggcgataaggtcgttcttacggggagacgcaacagagtcttacgcagggcatttttacggatgcagaaattttatctgccgcgtaaaaagtctagcttttaccggtctgatacttttttgcaatggggtggactggcaatattggcggtcattctttacggtaacttgagtcctgtaggctgggcaggaatgagtctggtgggcgatatgtttattatgatctgctggattattccttttttattttgttcccttgagcttttgtttgcccgcgatgatgacaagccttgcgttaatcgtgtaatcatcactttgtttttaccactgatttgtagtggcgtggccttctattctctctacatcaatgtcggagatgtattcttttactggtatatgccagcgggttattttaccgctgtttgcctgaccggttatctcactggcatggggtatatttttctgccaaagtttacccaaactggacagcaacgttatgcccacggtgaagctatcgttaactatcttgcgcgtaaagaggcagcaacacacagtggacgtcggcggaaaggggaaacacggaaactggattacgcgttgctaggttgggctataagcgcaaatttggggagggaatgggcgttacgcattgcccctagcctttctagcgcgattcgcgctccagagattgcccgtaacggcgttttattcagtttacagacgcacctaagttgcggggccaataccagtttgttggggcgaagttattccggtggtggtgctggcggcggcgcgggtggcggaggcggtggtggctggtaattaagctgatgttaatcgaaacaagctttaaccataaagatagtgtagtatgttgcgcctcaaagccaggccgataaacgtcgagtcgtttacttaaggcctgaagagttcaaacagactttactatcagtgagtcagatgtaagttctgactcactgttgcacaaaagcatatcagacgcctgggaaggcgacaccaaaaggaagctctatgagcgaaaagctacagaaagtgctggcgcgtgccggccacggttctcgccgtgaaatcgaatctattattgaagccggtcgtgtgagtgttgatggcaaaattgctaaactcggcgatcgtgttgaagttacccctggattgaaaatccgtatcgatggtcacctgattagcgtacgtgagtccgctgaacaaatttgtcgcgttctggcctattacaaaccggaaggtgagttgtgtacccgtaacgatccggaaggacgtccaacggtgtttgaccgtctgccaaaactgcgtggcgcacgctggattgccgtgggtcgcttggacgttaatacctgtggtctgctgctgttcaccaccgatggtgaactggcaaaccgtttaatgcacccaagccgtgaagttgaacgtgaatatgccgtgcgtgtatttggtcaggttgacgacgcgaaactgcgtgatttgagtcgtggcgtgcagttggaagatggtccggcagcttttaaaaccatcaagttcagcggcggcgaagggatcaaccagtggtacaacgtgactctgaccgaaggccgtaaccgtgaagttcgtcgtctgtgggaagcggttggtgtgcaggtgagccgcctgatccgtgttcgttacggtgatatcccactgccaaaaggtctgccacgcggtggctggacggagctggacctcgcccagactaactatctgcgcgaactggtggagctaccgccagaaaccagctctaaagtcgctgtagaaaaagaccgtcgtcgcatgaaggcgaatcagattcgtcgtgcggtgaaacgtcacagtcaggtgagcggcggtcgtcgttctggcggacgtaataataacggttaatcaaagtatgccggacgtcatatccggcatttttacagattaataatcgatccctatctgcgcttttacaccggcatcaaacgcatgtttgacggggcgtaattcacttaccgtatctgccagttcaagaatatcccgatgacaaccacgacccgtgataatcaccgtctgttgatgtggacgttcatttaacgcctgcaccacttcttccagtggcaaatagtcatacgccaccatatacgtcagttcatcaagcaaaaccatatccagactggaatcagcaagcatccgctttgcatgttgccagacttcgcggcaggcggcggtatcagactcgcggttttgtgtatcccaggtaaagcccgttgccatcacctgaaactcaacgccatgtggctccagcagattgcgttcgccattaggccaggtgcctttaataaactgcacgacgcctactttttttccgtgaccaactgcgcgtgttgccgtaccaaatgccgcggtggttttgccttttccattgccggtaaagacgatgataataccgcgttcatcctgggcctgggccacacgagcatctactttttctttcactcgctgctgacgctgttggtagcgttcatcactcattgggaaattcctggtttacggcccggttgggcgtcaaaggtcatgccggttttacggcggctgtcatcgcccatcagccagaggtagagcggcatgatatcagcgggtgttttaagtttctgtggatcttcggtcgggaaggcgctggcacgcattgcggtgcgcgtaccgcctgggttaatgcagttgacacgcaggcgctgctgatattcatcggccagtacctgcatcatcccttcggtggcaaatttgctcgctgcatatgcaccccagttggctcgtccctgacgtccaacgctactactagtaaagaccagactaccggcgtcgcttttgagtaataaaggaagcagtgcctgggtgagcataaaggtggcattaacgttgacctgcatgacgtcctgccagacctgcggattttgttcgctcattgggcaaacatcgccgagcaatccggcattatgcaaaacaccatccagacgcggataattaacggcaatgcgctgtgccagttgttggcaattttcggacgtgcaggtcagcaaatcgagaataaaccactgtggctgacgcccagtttcttcgtttatgtggctggctacctgacgtaatttttcttcattacggcccaacagaatcactgtcgcaccatagcgtgcatacgtcatcgcggcttcacgaccaataccatcgctggctcccgtcaccaggataatgcgatcattgagtaaatcttgttttggctggtaatgcatggctactcctcaacgacgttgtctgtcgcgctgccagtgtactttatgactttggggctttatgcctgaaacagaagggcatttcaatcagcctggggcgataacaccgcaaaatggatactttgtcatactttcgctgcaataacatctctgcgagacggcttaacatgcctgttgtaaactgtgagccaaagcgttgtttaaccaaggtggggactcgtggaattgttgtctgaatatggtttgtttttggcgaaaatcgttaccgttgtgctagcgattgcggcgattgccgccattattgtcaatgttgctcaacgtaataaacgccagcgtggcgagttacgggtcaacaatctcagcgaacagtataaggagatgaaagaagaactggccgcggcgctgatggacagtcatcagcaaaaacagtggcacaaagcgcagaagaaaaagcataagcaagaagcgaaagcagcaaaagcgaaagccaaactgggcgaggtggcaactgacagtaaaccccgcgtctgggtgctggattttaaaggcagcatggacgcccatgaagtgaacagcctacgtgaagagataacggctgtactcgcagcattcaaaccgcaggatcaggttgtgctccgtctggaaagccctggtggcatggtgcatggttacgggctggcggctagccaactgcagcgtctgcgcgataaaaacattcctttaactgttacggtagacaaagtcgctgccagcggcggttacatgatggcctgtgtggcggacaaaattgtttccgcaccgtttgctattgtgggttccattggcgtggtggcgcaaatgcccaactttaaccgcttcctgaaaagcaaagatattgatatcgaactgcacactgccgggcagtataagcgcacgctgacgttgctgggtgaaaataccgaagaagggcgggagaaattccgcgaagagttgaacgaaacgcatcagttgtttaaagattttgtgaagcgtatgcgtccttctctggatattgaacaggtggcaacgggtgaacactggtacggacaacaggcggtagagaaaggcctggttgatgaaatcaacaccagtgatgaagttattcttagcctgatggaaggccgtgaagtggtcaatgtacgctatatgcagcgtaaacgactcattgaccgattcaccggcagcgcggcagagagcgccgatcgattgttgctacgctggtggcagcggggtcaaaagccattgatgtaaaagacaaacgcgaggctaagacctcgcgttttgctttaatcaaccagatgatatttttcactaagcacatgggccaggtgtttgaacatattaaacaccgcggtgcttttggctgttggcaatccttgttcatctaaaaagtagtcgccggtaaataccagcacgccattacgctgcgtgacgccggtggcttcaatccctgcgagcgtatcctcatgctcacgaatgattttgttggcctctttcaacagcgtttcgcggtcgatgggttgtgtctctttgttcattatttactccttaaacaaggacattagtctacgccaggcatggcttgcagacaaatataccacgctggtggcaagagcgccttactggcaactttggattttgcatgctaataaagttgcgtatcggattttatcaggtacagtgtgacgctttcgtcaatctggcaatagatttgcttgacattcgaccaaaattccgtcgtgctatagcgcctgtaggccaagacctgttaactcagtcacctgaattttcgtgaacagagtcacgacaaggggttgatatccgcagagagcgagtccatatcggtaactcgttgccagtggaaggtttatcaacgtgcgacgcattcctggaagaatcaaattaggtaaggtgaatatgggtaaagctcttgtcatcgttgagtccccggcaaaagccaaaacgatcaacaagtatctgggtagtgactacgtggtgaaatccagcgtcggtcacatccgcgatttgccgaccagtggcagtgctgccaaaaagagtgccgactctacctccaccaagacggctaaaaagcctaaaaaggatgaacgtggcgctctcgtcaaccgtatgggggttgacccgtggcacaattgggaggcgcactatgaagtgttgcctggtaaagagaaggtcgtctctgaactgaaacaactggctgaaaaagccgaccacatctatctcgcaaccgaccttgaccgcgaaggggaagccattgcatggcacctgcgggaagtgattgggggtgatgatgcgcgctatagccgagtggtgtttaacgaaattactaaaaacgcgatccgccaggcatttaacaaaccgggtgagctgaatattgatcgtgttaatgcccagcaggcgcgtcgctttatggaccgcgtggtggggtatatggttagcccgctgctatggaaaaagatcgctcgtggcctgtctgccggtcgtgtgcagagcgtggcggttcgcctggtggtcgagcgtgagcgtgaaattaaagcgttcgtgccggaagagttctgggaagtcgatgccagcacgaccacgccatctggtgaagcgttggcgttacaggtgactcatcagaacgacaaaccgttccgtccggtcaacaaagaacaaactcaggctgcggtaagtctgctggaaaaagcgcgctacagcgtgctggaacgtgaagacaaaccgacaaccagtaaacctggcgctccttttattacctctacgctgcaacaagctgccagcacccgtcttggatttggcgtgaaaaaaaccatgatgatggcgcagcgtttgtatgaagcaggctatatcacttacatgcgtaccgactccactaacctgagtcaggacgcggtaaatatggttcgcggttatatcagcgataattttggtaagaaatatctgccggaaagtccgaatcagtacgccagcaaagaaaacagtcaggaagcgcacgaagcgattcgtccttctgacgtcaatgtgatggcggaaagcctgaaggatatggaagcagatgcgcagaaactgtaccagttaatctggcgtcagttcgttgcctgccagatgaccccagcgaaatatgactccacgacgctgaccgttggtgcgggcgatttccgcctgaaagcacgcggtcgtattttgcgttttgatggctggacaaaagtgatgcctgcgttgcgtaaaggcgatgaagatcgcatcttaccagcagttaataaaggcgatgctctgacgctcgttgaacttacaccagcccagcactttaccaagccgccagcccgtttcagtgaagcaagcctggttaaagagctggaaaaacgcggtatcggtcgtccgtctacctatgcgagcatcattagcaccattcaggatcgtggctacgtgcgagtagaaaatcgtcgtttctatgcggaaaaaatgggcgaaatcgtcaccgatcgccttgaagaaaatttccgcgagttaatgaactacgactttaccgcgcagatggaaaacagcctcgaccaggtggcaaatcacgaagcagagtggaaagctgtactggatcacttcttcagcgatttcacccagcagttagataaagctgaaaaagatccggaagagggtggtatgcgcccgaaccagatggttctgaccagcattgactgcccgacttgtggtcgcaaaatggggattcgcacagcgagcaccggggtattccttggctgttctggctatgcgctgccgccgaaagagcgttgcaaaaccaccattaacctggtgccggaaaacgaagtgctgaacgtgctggaaggcgaagatgctgaaaccaacgcgctgcgcgcaaaacgtcgttgcccgaaatgcggcacggcgatggacagctatctcatcgatccgaaacgtaagttgcatgtctgtggtaataacccaacctgcgacggttacgagatcgaagagggcgaattccgcattaaaggttatgacggcccgatcgttgagtgtgaaaaatgtggctctgaaatgcacctgaaaatggggcgtttcggtaaatacatggcctgcaccaacgaagagtgtaaaaacacacgtaagattttacgtaacggcgaagtggcaccaccgaaagaagatccggtgccattacctgagctgccgtgcgaaaaaagtgatgcttatttcgtgctgcgtgacggtgctgccggtgtgttcctggctgccaacactttcccgaaaagccgtgaaacgcgtgcgccactggtggaagagctttatcgcttccgcgaccgtctgccggaaaaactgcgttatctggccgatgcgccacagcaggatccggaaggtaataagaccatggttcgctttagccgtaaaaccaaacagcaatatgtctctagcgaaaaagacggaaaggcgactggctggagtgcattttatgttgatggcaaatgggttgaaggaaaaaaataacctttaattctgtcaggtttttataaacaaagggtcgcgaaagcggcccttttttattgcatattattttttcttcacacctatacactaaggctataaatgatatagtggttatagttagcaccttttttattattaaatcgtattagtcacccgccaggtgtgacgaaaaaacgatgttctgatggcgtctaagtggatggtttaacatgaaattacaacaacttcgctatattgttgaggtggtcaatcataacctgaatgtcagtagtacagcggaaggactttacacaagtcaacccgggatcagtaaacaagtcagaatgctggaagacgagctaggcattcaaattttttcccgaagcggcaagcacctgacgcaggtaacgccagcagggcaagaaataattcgtatcgctcgcgaagtcctgagcaaagtcgatgccataaaaagcgttgccggagagcacacctggccggataaaggtagtctgtatatcgccaccacgcatacccaggcacgctacgcattaccaaacgtcatcaaaggctttattgagcgttatcctcgcgtttctttgcatatgcaccagggcagcccgacacaaattgctgatgccgtctctaaaggcaatgctgatttcgctatcgccacagaagcgctgcatctgtatgaagatttagtgatgttaccgtgctaccactggaatcgggctattgtagtcactccggatcacccgctggcaggcaaaaaagccattaccattgaagaactggcgcaatatccgttggtgacatataccttcggctttaccggacgtagtgaactggatactgcctttaatcgcgcagggttaacgccgcgtatcgttttcacggcaacggatgctgacgtcattaaaacttacgtccggttagggctgggggtaggggtcattgccagcatggcggtggatccggtcgccgatcccgaccttgtgcgtgttgatgctcacgatatcttcagccacagtacaaccaaaattggttttcgccgtagtactttcttgcgcagttatatgtatgatttcattcagcgttttgcaccgcatttaacgcgtgatgtcgttgatgcggctgtcgcattgcgctctaatgaagaaattgaggtcatgtttaaagatataaaactgccggaaaaataatttcttgcgttattttcggcaccttttatgtagcgaaggtgccggaatatattctcttttgttacttatttctataccgtgcacaatatttttatccctcatatttatagggtaaattacctgtaaagtagtgtctaattacccgcctcgcaaactccagttttcaaatatctatttcaggtcaaaagattgaattattcactggagacgattcgtaaattcgctggatttttgactaaagtttctttaggatttgtctcatcgtatgattaattacaccaatcgttcaacgtcttgctgataagtgatggcgattatatgaggttagcaatgccttctggaaatcaggaaccccgccgcgatcctgaattaaaacgtaaagcctggctggcggtttttcttggttctgcacttttctgggtggttgtcgcactgctgatttggaaagtgtggggataactatggtcggtcaggagcaactggagtcgtcaccattatgccagcatagtgacaatgaaacagaaacgaaacgggaatgttccgtcgttattccagacgactggcaactaacatcgcagcagcaagcctttatagaactgtttgctgaagatgatcagccgaaacaataattatcatcattcttattacccatttttaatgaattaaagggcttttaatacaccgcagcaataacagcttgagttatctcaacacaaaataataaccgttaagggtgtagcctatgatcaacacaaatatgaaatattggtcctggatgggcgcgttttctctgtcgatgctcttctgggccgaactcctctggatcattactcactgatccttgaccccgctgcggcggggttgtcatttgctttgccacaaggtttctcctcttttatcaatttgggttgttatcaaatcgttacgcgatgtttgtgttatctttaatattcaccctgaagagaatcagggcttcgcaaccctgtcattaaggaggagctatgagcagtaccctacgagaagccagtaaggacacgttgcaggccaaagataaaacttaccactactacagcctgccgcttgctgctaaaagtctgggcgatatcacccgtctacccaagagtctcaaagttttgctcgaaaacctgctgcgctggcaggatggtaacagcgttaccgaagaggatatccacgcgctggcaggatggctgaaaaatgcccatgctgaccgtgaaattgcctaccgcccggcaagggtgctgatgcaggactttaccggcgtacctgccgttgttgatctggcggcaatgcgcgaagcggttaaacgcctcggcggcgatactgcaaaggttaacccgctcagtccggtcgacctggtcattgaccacagcgtgaccgtcgatcgttttggtgatgatgaggcatttgaagaaaacgtacgcctggaaatggagcgcaaccacgaacgttatgtgttcctgaaatggggaaagcaagcgttcagtcggtttagcgtcgtgccgccaggcacaggcatttgccatcaggttaacctcgaatatctcggcaaagcagtgtggagtgaattgcaggacggtgaatggattgcttatccggatacactcgttggtactgacagccacaccaccatgatcaacggccttggcgtgctggggtggggcgttggtgggatcgaagcagaagccgcaatgttaggccagccggtttccatgcttatcccggatgtagtgggcttcaaacttaccggaaaattacgtgaaggtattaccgccacagacctggttctcactgttacccaaatgctgcgcaaacatggcgtggtggggaaattcgtcgaattttatggtgatggtctggatagtctaccgttggcggatcgcgccaccattgccaatatgagcccagaatatggtgccacctgtggcttcttcccaatcgatgctgtaaccctcgattacatgcgtttaagcgggcgcagcgaagatcaggtcgagttggtcgaaaaatatgccaaagcgcagggcatgtggcgtaacccgggcgatgaaccaatttttaccagtacgttagaactggatatgaatgacgttgaagcgagcctggcagggcctaaacgcccacaggatcgcgttgcactgcccgatgtaccaaaagcatttgccgccagtaacgaactggaagtgaatgccacgcataaagatcgccagccggtcgattatgttatgaacggacatcagtatcagttacctgatggcgctgtggtcattgctgcgataaccagctgcaccaacacctctaacccaagtgtgctgatggccgcaggcttgctggcgaaaaaagccgtaactctgggcctcaagcggcaaccatgggtcaaagcgagcctggcaccgggtagcaaagtcgtttctgattatctggcaaaagcgaaactgacaccgtatctcgacgaactggggtttaaccttgtgggatacggttgtaccacctgtattggtaactctgggccgctgcccgatcctatcgaaacggcaatcaaaaaaagcgatttaaccgtcggtgcggtgctgtccggcaaccgtaactttgaaggccgtatccatccgctggttaaaactaactggctggccagcccgccgctggtggttgcctatgcgctggcgggaaatatgaatatcaacctggcttctgagcctatcggccatgatcgcaaaggcgatccggtttatctgaaagatatctggccaagcgcacaagaaattgcccgtgcggtagaacaagtctccacagaaatgttccgcaaagagtacgcagaagtttttgaaggcacagcagagtggaagggaattaacgtcacacgatccgatacctacggttggcaggaggacagtacctatattcgcttaagccctttctttgatgaaatgcaggcaacaccagcaccagtggaagatattcacggtgcgcggatcctcgcaatgctgggggatagtgtcaccactgaccatatctctccggcgggcagtattaagcccgacagcccagcgggtcgatatctacaaggtcggggtgttgagcgaaaagactttaactcctacggtagccggcgtggtaaccatgaagtgatgatgcgcggcaccttcgccaatattcgcatccgtaatgaaatggtgcctggcgttgaaggggggatgacgcggcatttacctgacagcgacgtagtctctatttatgatgctgcgatgcgctataagcaggagcaaacgccgctggcggtgattgccgggaaagagtatggaagtggctccagtcgtgactgggcggcaaaaggtccgcgtctgcttggtattcgtgtggtgattgccgaaagctttgaacgaattcaccgtagcaatttaattggcatgggcatcctgccgctggaatttccgcaaggcgtaacgcgtaaaacgttagggctaaccggggaagagaagattgatattggcgatctgcaaaacctacaacccggcgcgacggttccggtgacgcttacgcgcgcggatggtagccaggaagtcgtaccctgccgttgtcgtatcgacaccgcgacggagttgacctactaccagaacgacggcattttgcattatgtcattcgtaatatgttgaagtaacaactatttgcttgccggttattttgcttccggcaagcaaatgaattacacaatgcaagagggttatttgttcagcaaatggcccattttctcggctttggtatcgagataatgttcgttattggggttacgacctacaatcaatggtacgcgttcaacaatattaatccctgcttcggtcagaatttcgacttttttcgggttattggttaacaagcggacttcattgacgccaaggagtttgaacatatcagcgcaaagagtgaagtcgcgctcatcagcggcgaagcctaactggtggttagcctctacggtatcgtaaccttgatcctgcagtgcgtaagcgcggattttattcagcagaccaatgttacgaccttcctgacggtgatacagcaaaataccacggccttcctcggcaatttgcgtcaatgccgcttcgagctggaagccacaatcgcagcgcaagctgaacagggcgtcaccggtcagacattcggaatggacgcgcgcaagtaccggggtatgcccggaaatatcgccatagactagcgcgacatgatcgtgtccggttgccagttcttcaaatcccaccatcaggaaatcgccccatggggttggcagtttggcttctgccacacgtttaagctgcatgaaattctccagataatgctggttctgtattggcttattttgccataacgagaaggggttcacctaatcacgacgcgtcgatcgttcacggaatggcacaaatctgtcaatttttcctggaactggcgttttcagttatgattgtgggacttatcaaaaaggagaggccatgcgtagcattgccagacgtaccgcagtgggagctgcactattgcttgtcatgccagtagccgtatggatttctggctggcgttggcaacctggagaacaaagttggctactaaaagcggctttttgggttactgaaactgtcacccagccctggggcgtcattacacatttgattttattcggctggtttctctggtgtctgcgttttcgcattaaggctgcctttgtattatttgccattctggcggccgcaatccttgtgggacaaggcgttaaatcctggatcaaagacaaagtccaggaaccacgaccttttgttatctggctggaaaaaacacatcatattccggttgatgagttctacactttaaagcgagcagaacgcggaaatctagtgaaagaacagttggctgaagagaaaaatatcccacaatatttgcgtagtcactggcagaaagagacggggtttgcctttccttccggtcacacgatgtttgctgccagttgggcactgctggccgttggtttgctgtggccgcgtcggcgaacgttaaccattgctatcttgctggtctgggcaacgggagtcatgggaagccgcctgctgctcgggatgcattggccacgcgatctggtagtagctacgttgattagctgggcgctggtggcggtggcaacgtggcttgcgcaacgaatttgtgggccattaacaccacctgcggaagaaaatcgcgaaatagcgcaacgagaacaagaaagttaacgctggttgattttccgaatttagcccttaaatcatcaacaatgcgtgtggatgccatttcgcagacggcgcgaaaatggtactttaaagggctattgcggtaagttgaccataatttattcgctctaaccacataacgggaagtaatgtgaaatatttactcattttcttactggtgttagcgatcttcgtgattagcgtcacgttgggtgcgcagaacgatcaacaggtgacgtttaattatctgttagcgcaaggggagtaccgtatttccacattgctggcggtattgtttgctgcggggtttgctatcggttggttgatttgtggcctgttctggctgcgagttcgtgtttccctggcgcgcgctgaacgtaaaataaagcgactggaaaaccagcttagtcccgcgactgacgtggctgtagtgccgcacagcagtgcggcgaaggaataactttctatgctggagttgttgtttctgcttttgcctgtagccgctgcctatggctggtatatgggccgcagaagtgcgcaacaaaacaagcaagatgaagccaaccgcttgagccgtgattacgtagcgggggttaacttcctgcttagtaatcaacaggataaagcggtagacctgtttctcgatatgcttaaagaggatacaggcaccgttgaagcccaccttacgctcggaaacctgttccgtagccgtggcgaagttgatcgcgctattcgcatccatcagaccctaatggaaagcgccagcctgacctatgaacagcgtctgttggcgattcaacaactggggcgtgattacatggccgccgggttatatgaccgcgcggaagacatgttcaatcagctgaccgatgaaactgacttccgcattggcgcgctgcaacagttgctacaaatctaccaggctaccagtgagtggcagaaagcaattgatgttgccgaacgcctggtgaagctgggtaaagataaacagcgcgtcgaaattgcccatttctactgtgagttagccctgcagcatatggccagcgacgatctcgatcgtgccatgaccttgctaaaaaaaggggcggcggcagataaaaacagcgcccgcgtatccataatgatgggacgcgtgtttatggcgaaaggagaatacgccaaagccgtcgaaagtctgcaacgcgtgatatcccaggacagagaactggtcagcgaaacgctggaaatgttgcaaacctgctatcagcagttgggtaaaactgccgaatgggcagaattcctgcagcgtgcggtggaagagaacaccggtgccgatgctgaattgatgcttgctgatatcatcgaagcgcgcgacggtagtgaggccgcacaggtctatattacgcgccagcttcagcgtcatccgaccatgcgtgtgttccataagttaatggattaccacttaaatgaagcggaagaagggcgtgccaaagagagcctgatggtgctgcgtgacatggttggcgagaaggtacgtagtaagcctcgttatcgttgccagaaatgtggttttaccgcatacaccctctactggcattgtccgtcttgtcgggcctggagtaccattaaaccgattcgcggtcttgatggcctgtaatttttaaaaaaaatccgactttagttacaacatactaattattaatgttccattgtgctccggcaacgacggcgcagaaaaagcctgccaggggagaaatcgcaactgttaattttttatttccacgggtagaatgctcgccgtttacctgtttcgcgccacttccggtgcccatcatcaagaaggtctggtcatgacgttaactgctagttcttcttcccgcgctgttacgaattctcctgtggttgttgcccttgattatcataatcgtgatgacgcgctggcctttgtcgacaagatcgacccacgcgattgtcgtctgaaggtcggcaaagagatgtttacattgtttgggccacagtttgtgcgcgaacttcaacagcgtggttttgatatctttcttgacctgaaattccacgatatccccaacactgcagcgcacgctgtcgctgctgcagctgacttaggcgtgtggatggtgaatgttcatgcctctggtggggcgcgtatgatgaccgcagcgcgtgaggcactggttccgtttggcaaagatgcaccgcttttgattgctgtgacagtgttgaccagcatggaagccagcgacctggtcgatcttggcatgacactgagtcctgcagattatgcagaacgtctggcggcactgacgcaaaaatgtggccttgatggtgtggtgtgttctgctcaggaagctgtgcgctttaaacaggtattcggtcaggagttcaaactggttacgccgggcattcgtccgcaggggagtgaagctggtgaccagcgccgcattatgacgccagaacaggcgttgagcgctggtgttgattatatggtgattggtcgcccggtaacgcaaagcgtagatccagcgcagacgctgaaagcgatcaacgcctctttacagcggagtgcatgatgagtgattccaacagccgtctggtctacagtacggaaaccggacgtattgatgagtccaaagcggcccctgtacgccctaaaggcgacggtgtggtgcgtattcagcgtcagaccagtggacgtaaaggtaagggcgtttgcctgattaccggtgtcgatctcgatgatgccgaactgacaaaacttgcagcggaactgaagaaaaaatgcggctgcggcggagcagttaaagatggagttattgaaatccagggcgataagcgtgatttattaaaaagtctacttgaagcgaaagggatgaaggtaaaactcgcaggcggttaacataaaaagccacggatatatccgtggctttcgaatattttactgtgcgtattattcagttatttcgtactgaacagaatcaagcgtattataattgcgagtcgataatcgacatttatttacgattatttaccgacctggtgaccaataacacctccgacagctgcaccacctaatgtacccaacgtactgccatcggtcagtactgcaccgcctaatgcccctgcacccgcgccgattgcggtgttgcggtcccgtttagaccagttagaacaggcactcagagacattgccaaagtaattgccagaacagccgcggtcatttttttgctcgttacaaacataatactctctcctgaatttatgattcacggaagtaagctctctataactataatagctaagaataagtctggtgaaattattccgtgaaatctgctcgcgcgcagggttatatcacgcaggtgataatgacttcctgttatatcgctgataataattttatatcttgagagtgttaataacaggtaaatagtcttaattatcaaccaggaatcatcttagagcggatgatttgccaaactgcaaatcatccgtagagaagggaaatggttaaatgtcaacgacgtgaatggtgagtttactgtgctcaagatgcatcagatcgctggcgcgtattttgctatcggtaatcacgcgattgaatcgctcaacgggaccgatggagtaactatgtacagcaccaaatttgctgctgtcagtcaggactatcgcttcgcactctttttccagcacggcattgaccacatcggtacgcatcatatcgcgaccggtaaatccagtttcaggttgccagccatcaataccaataaatgctttgctgaaatgcacctgttggatgcactggcgtgtcaaagggccaaccatactttcgctttttttctgatacacgccaccgagcaaaataacttcacaaggcgcgtctttcagcaaatgcgcgatgtagctgctgaccgtgatgatagtgacatttttcttctgctcgcccagagtccgggcgagtagggcattgctgctgccattttcgataaagatggtttcgcccggttgaaccaggctcgcggcaaactcggcgagttcacgcttcagcgtatagttgctcatcatacgggtttcgacgtcatcactatcaaggctaacagcaaagccatgtgcacggcggaggtaactcagtttttcgagtgtgttgagatcctggcgaatggtaacttcagaaactccagtggcttttgccagatcggttacgctaacctgaccctggtcaatgaccatctgtagaatagtttgttgtcgggaattcatcgctgtaattcttataacgttataatacttaataaaaaaatactgacgcgccgggcatcctcaaataggaaaacctgaaggcacgattgttaaatctcccacggtgccttcgggatgtctggcgtagattcagcaacctggcgcaagagttctgctttaagtatctcgagattatggatcgcagagtggtaatcgcctgccacaaggatatctaacacaatatcaatacgttcggcaacgcgctgggcatcaaattcagacatcaaggacatccttatagcaaaagggggaaaatgaataatgcaaaaattgccgctaaaagagaagtgtttaacagcaacggctaattatcatccaggaatacgatatataatgacgggatatagcgctaagtatatatattcatctacttatgcgcgcttcagatagcgtttataccagcgttcgaaggcgacggcgggcatcggtttggcaaacaaaaatccttgccgctcattgatcccgttcttggttaaaaaagcatcttcctttgcactctctacaccttcggcgatcacctgaagattcaatgcctgggccacagcgacgatcgcccggaccagactctggctgacaggttgtttgtgaatatctcgaacaaaaacctggtcaagtttgatggcatcgatcggaaagcgcgccagttggctaagactagagtagccggtaccaaaatcatccagatgcacttgcgcacctagttggctaaattgttgaataacagacagtgccagttcatcattctcaatcagacaactctctgtcagttcaacatctatagggcagtattcaaaattgagttcctggagaacctgtttcagggcggtgaaaatggtttgatcggcgagctgacgtgcagaaatatttaccgccactcgcaggtttatgcctttatcccgccactttgccacctggcgtacgacatcgagaatcacccaacggcctaaaggcacaattagcccactctcttcggcgtaggaaatgaagtccaacggtggaatcaacccacgttcaggactctgccaacgtactagtgcttccagactgcgcacttcgccacgccaggtgattttcggttgatagtgaataaccaactgatcgttttccagtgctttacgcaagttggtatccagccagagatattcaaatacccgttgattcatttctggggtaaaaacgcaaaattgtcctcgtccgccttccttcgctgtgtacattgctgtgtcggcgtgacgaataatagccgtgctgtcactaccatgttcgggagagagtgcaatacctacactacagctggtataaacttcaattaaaccaatgcgaaaggggagccgtaagcgggtcaaaattcgacttgccattgcttccagcgcgctttgactggtgttggatgccagtaccagaaactcatccccacctggacgagccaacacctggtcatgttcgagacagcttaaaatagccaaactcacgtcgcgtaataactggtcaccaaacaaatgcccataggcgtcgttgacctttttgaaattatccaaatcaagatacacaaccccaactttattgttatctgcatgattaatagcgtgatcgattaaatcctgcattgcgttacgattcggcagtccggtgatactgtcggtatttgccagaatacgcagtcgctcctgagcgcggcgctcttcggtaatgtcggtgccggaacagattaaaaaaatctcgtttttgccactgccgctgtggacaaatttattgcgaaacagaaacagccgctggcctttacatgttggtatccacagttcgacttcatatgcattgccgcttcgaaaaaatacacggttattgcgcctggatgccgcagcttcacgacggctcataaacagtttaaacacgctttgcccaatgacgtcgtgttctttcaaccctgtgtaatcttcacataaccgattgaagcgttggatattcccccggctgtcgagaatcactattgcggaatgtgcttcagaaactacctgctcagcaaaggaaagcccgtgacttaaatcacgagcaaccgccggtgtgtcatgccatgcagacgcgttgccagcccattcccgtttattgatttttcgtcctaccagatgcacagaaagatcgctttcatcgacggtcagactcatcatcaggctggaggtgatgaccgtcatttccctgatgcgagcagcctgttcggcagataactgcaatgtacgatcaggttctgtggtttcggtggtagaaaagcgcaaaacatcgctgctttccgtcaaccgccagtatggattgtggcttccgagaaagttgtacaacgttgtggactccctaacggttttcatgatgcatatcctccggttaacagcggagtccgcggttaaataaaaggaacaacatgacttacatgaaattaacggcggctaaacgcattgttttttttatatatttatttgtaatccagttttggaaaaacgccagttttcaaacgaaagtcagttaaaaaatctgcctggatataacgaaggtagagcggggaaataaacggcccatccatgaggaatgggccgtgaaaggagattacgcgaccgggcgcgcaataatgctgcgggtttccatgcggacttcggcaatagtgacgtcaataacgtcagtcactttgtaaaccgtttcacctttaatttgtacagtgccgttttcctggctgcaaaccagttcatcgcgcacagcgtgtaagaaaggtgccggaataaaggcgatagcgccgttatcaaccaaacgaacacgcatgccgccacggctgatatcgacaatttccgctgcgaaacgggtgtcggtcccggctttgtctttcaggaagcgtgcgtataaccagtcaccaacatcacgttctgccatccggttgagacggcgacgctcggccatttggacagtgatttcatcctgtgggcgcgtcgcagtttcgcctttgataaccgctttcagcagacggtggttgatcatgtcgccatatttacggatcgggctagtccaggtggcgtatgcttccagaccgaggccaaagtgaggaccgggttcagtgctaatttcagcaaaactctggaagcgacgaatgcggctgtcgaggaaaccagttggttgcgcgtccagttcacgacgcagtttgcagaaaccgtccagcgtgagcacttcttcggcatcgacatgcagaccgtgcgttttcagcaacgctgccagcgcgtcggcattcgccggatcaaagcccatatgcacgttatagatgccaaaaccgagcttatcgcgcagtacgcgggccgcacaaatgttagcggcaatcatcgcttcttcgacgatacggttggcaatgcgacgaggctcggcgacgatatccagcacttcacctttttcaccgagaataaagcggtaatccgggcgatctttaaacaccagtgcgtggttatgacgccactcgccgcggcgttggcaaatttgcgctagcaaacggacttgttcggcaattgcttcactttcaggctgccagtcaccggtattttccagccagtcagaaacctggtcatacaccagctttgctttggattcgatggtggcggcaaagaattcgatattatcttcaatggtgccatcagcggagagcgtcatgcggcatgccagtaccgggcggacttcattggcgcgcagactgcagagatcgtcagaaagctcgcgaggcagcatagggatgttgaagccaggcagatagttggtgaatgcgcgaattttcgcggctttgtccagcttgctgccttcagcaatccacgcggttggatcggcaatcgccacaatcagctgaagtttgtcatccggcaacgccttagcgaaaagggcgtcatccatatcttctgtgctggcactgtcgatggtgacaaaatccagcgcggtcagatcttcacgaaccagaccttcatcgagcatttcggtagcgacgccgtctggtgcttctttttccagattatggcgtgcaagggtaacccaccacggtacaaagtgatcgtcaccaaaagtgatgtattgtgtcagttctgcatagaaagaacgatcgcctttcagcggatgacggcgcatttcggcaaccgcccagtcgccttctttaaactcgtggttcaggccacgggctgcgcggcaaggaatggcgtcttttaagagtggatgatcaggaacgatggccagacggtcatttttgccctgaaccttacccacgaaacgagtcaggaacggttcaaccagttcttctggctctgcggattcacgttctttttcactgtggatcaccgcgataattcggtcgccatgcatgacttttttcatctgcggcggcggaatgaaataacttttttgcgcgtcgacttccaggaagccaaagcctttttctgtggcttttaccaccccttcagcgcgtggcgtctgggaatgcagttgctgtttaagctgcgctagcagcgggttgtcctgaaacataattgtctattttggtggccattagagcggctgacagttttacgcgaatctgtctgacgcggcaaggttaatatgtctcacccaacgcgatttttaagcgatttatccagccacacagcccgctccataccagcagattaataatctgcgtactacttttttcgtgttcgagtaaagggctgaactgggcggcgctaaagcgatcgggtgctcgggtcagccattgtatcgcctgaacggtagcgcgctcaacagaatgacggtcagcccattggttaatttcattttcgcccttgcgcataagggtgctgatttttttatattcattactactatccatacaggtggcaaaacaagcaggactgccatttatacgcgcgcataacaacgccgcaagctgattatccggctgtgtattgccccgtgtgctgtttaacaacttttcgagaagggaaagactaatagggtggagagagagtatttcggccagttggcaaagttctgcagtactactttttgtgtgctcttcaggtagtttttccacctcatagctgcttcgccagcgtaaactttcatcagcaaacagactcgcgtcggcgtagttttgtatctccagcccgggtaaccagcgtaccggatgcccgagataagcctgaaatgtcgcaattgtccgcgcctgaaagccaataaaaccaatgatttggctaatgatcacacagtcccaggcagtaagaccgacgtcattcagatgctggcggcttcggttgtcgataatagaagggctgctagccagttggcgggcatattgcgtgatttgtgccaaccgatgattactttccctggtggaatcaggcccggggagcggcgtaagtcgcgcgctatagtagttacataaccgctggacgccgcaaacctgagcaaccgtcagggccgtgctcaagcgttcataagcggtgaaggtctgactacgggtcacggtaagctggtcagggaacaaatccactgcaagaacacgcgcagggtccagccaactaaggaagggggccagcgtttctttttcaaggatcacgtcgagtagaaagggatcgctgacctttgcggcttccgggaccagaggcagaacgtcatactccgtagtactggattgcgtttcatgataccagtggcttttgccggtgatgtggcgttgttccatgggcgctccttggtcgtaaaggaaatcgttatcctgacgcaaggcgggaaggggagaaagacggatcggcgataacaaatatcagaaaggtataacagagataacgggcggcagaacgccgcccatctttaccaacagaacgattatttcagttcgagttcgttcattgcagcaatgctgaaaccgccgtcaacgtggaccacttcaccggagataccggcagagagatcggagcacaggaatgccgcagagttacccacatcttcaatagtaacggtacggcgaatcggggtaacggcttcgcaatgagccagcattttgcggaagtctttgataccggaggccgccagagtacggatcggaccagcagagatggcgttaacacgcacaccttccggacccatcgcgttcgccatatagcgcacgttcgcttccagagacgcttttgccagacccataacgttgtagttcgggatagcgcgctcagcgccaaggtaggaaagggtcagcagggcagaacccggattcagcatggagcggcaagcttttgccattgcaacgaagctgtaggagctgatgtcgtgggcaattttgaagccttcacgggtaacggcgttaacatagtcaccatccagctgatcgccaggtgcaaaaccaatagagtgtacgaaaccgtcaaatttcggccaaactttccccagttcagcgaacatggtgtcgatgctggcatcttctgcaacatcgcactgcagaacgatgtcagaacccaattgagcggcaaattcttctacgcggcctttcagtttgtcgttctggtaggtgaatgccagttcagctccttcgcggtgcatcgcctgagcgataccgtaggcgatggatagtttgctggcaacaccggttaccagaatgcgcttaccggaaagaaaacccatagctttaatccttattgttgatgcttgttgtgcctgaaaatcaggcgattcgtcgttttagtaaacagtacgaacagataaacggttattataatcaacctggctgtgagtagctatagttgccaggtccgaccggagcaggctgcggcagggggggcgcttttcccctcaccctaaccctctccccagaggggcgaggggaccgtattgtgcaaatattgttaccccagcaacaaacaggctcatacagcccctaaccctttcatggcgatggctgggacggttcagaccttgccgaatattctccagcaccgtctccatgttttcaccacaacagctattcggctcggtctgccccctcgctctttcagggagagggactccggcggttcagttcctgcagaatattctccagcaccgtctcctcattacaatcaatctcgttattccagaaacgcagcacggtccagccctggctctcaagccagctagtgcgcctggaatcataggcaactgctaaatcatgctgcccaccatccagctcaacgactacacgcgcgctgcagcaagcaaaatcgagaatgtagctccccactggatgttgacggcgaaatttgaaatcactaaaacgtcggctgcgaagatatcgccagagctttcgttcctgcaaagtgagattgcgtcttaaatcacgcgcattacttttaattttatctatcacctcattctgacaagatttaatcttttgtcagaatgaggtgaataatctggaaggaggattcagaaaattagcgatctttacgccacgcatccgccgtcaatgcctcgccaaaatgaccggcaatcagccgtttggtgagttcatgcagcgggcttgccagcacatccgcggtgctgcctcgctcgacaacctcgccctgatgcatcaccagcacctggtcgctaatgtgcttcatcattccgatatgctgggtaacataaatatagctaatgccctgtttttcctgtaattccagcatcagattaatcaactggctacgcatgctcatatccagactagcgagggcttcatcggcaataatgacttttgggcgcaatatcagcgcgcgcgccagacccagacgctgtttttgtccgggtgccaacatatgcggatagtaactgacgtgatccggtagcagcccaaccatacgcatcgtttcaataatctgtttgcgacgctgttccggttccaggtcggtgttcaggcgcagtggaaaatccagaatttggctgatacgttgacggggattcaagctggtgctaggatcctgaaaaatcatgcgaatacgctgactgcggaaggaataatcgccaaaatgcagtggatgatcgtcaatcaataactcgccgctggtaggctctatcattcccgccagcatttttgccagcgtggatttaccgctaccattctcgccaataatcgccagtgtctggccttcacgtagcgtaaagctcaagggttttaccgcttctacggtctgacgacgaaaccagccggtccggtagcggaacgttttacttaaattacgcacttcaagcagcgtttcgatcatctcactctttctccatgttcagcgggaaatgacaggcatagagatgatttttcgcccccgtcaaacgtggcgtcacaatgcattctcgttgtgcatacgggcaacgtggccccagacgacaaccaatcggtaactgttccagcagtgggatagcgccgggcagcgtattgaggcgacttttatgcggcatcgcgctgccgaagtctggtatcgcgcggatcagcgcctgggtataaggatgatgtggcatcgtcaccaactccttactcggcgcggtttccactgtttgaccgcagtaaagcacgttaattttatccgcccattggctaagcatttgtaagtcatggctgataagcaaaatagtggtattgctgttttggttgagacgcgtcagcaggcgaaagatttgcgcctgggttgttggctccatactgttggtcggttcgtcagcaatcagcagacgcggttgattcgccagtgcaatggctatcatcactttctgacattcaccttcggtcaactcatagggaaaactgcgcatcgcatctttgtgatctttaatccccacgcggtgcagcagttcaatggcacggcgtttgcgccagccaaaacgctgccaccaacggcctttataggtccaggctgggatgttttgcatcaactggcggcccacacgttcactagggtcaagacagctctgcggttcctggaaaatcatgctcacgttatggccaaccagtttgcgccgttcgcgtgcggagagacgcagcaaatcgatatcatcaaaacgcatacggtcagcagtaacacgccagttatctttattcaccccacaaatcgctttcgcaatcaaactcttgccggaaccggattcaccaacaagaccgcggatttcaccttcggttaaggtcatacttacccggtcgacggctttaacccactcatcaccggttttaaattcaatggtcaggttacgaatatcgagtaatggcattattccacccccgcaataatcgcacgacgaacgccatcgccaaggaggttaaccaacaacacgctaatcataattgccgcacctggcagcatgacagtccacggggcgacataaatcagttccagcgcatcaccgagcatcgctccccattcagggctggggagttgtgcgccgagatcgagaaagcccagcgcggcgatatcgagaattgccatgctcagtgcgcgggtgatctcggtgaccagcccggcggtgatgtttggcatcacagcaaaccagagaatattcagcgtacttgcgccatccagacgggcggcgataacgtactctttttccagttcgtcatgcaccatgctgtaaatgctacgtaccatacgcggcagcaatgccagccagacagcaaacatagcgtgggacaaactcggtccggcaaacgctacaacgataattgccaacagcaggctagggatcgccagtaaggtatccagaatatggttaagcaccgcactgcggaggccgtgtgtcgccccggcgaaggtgcccagtaccaggccacagatcgtcgcggcaagcgtcaccacaaatgcgccacccacggttggcgcagctccgctcagtaaacggcttaaaacatcgcgtccgaggtcgtcagtccccaggaagaaagaaacttcgccatagcggctccaactcggcggcaataattgataaccgagaaattgctggtcgatgccgtaaggcgcaaaccagccgccaaaaatacacagtacagccagccccgcgcagccgtacaggccgaccatcgcagaggcgtcactataaaatttgcgccaggcggtacgcagcgtgcccggcgggcgcttttcgctgtatacgctatcgtaaggcataccattccttatgtttcagattatttatcgtaaggcataccattccttatgtttcagagggttagccatggcacccaaaatatcagaaatcacgttaacaataatgaccagactgccacacaccatcactccggcggaaatggctgcgtaatcctgctggcggatggcgttaattaaccagcgccctaaacccggccagctaaaaaccatttcggtgatcatcgccagcgtcagcatggtggaaaactgtaagcccaggcgaggaataaccggcggtaacgcgttatgcagaacgtggcgacgcaaaatagtaaagcggctcaaaccgcgggtcgccgccgcttttacatagttctggtcatacacttcgatagtgctgatacgcatcaggcggatcacttcagttgttggcgcaacgctcagggtgatcacgggcaatatcatatggcggattgcgctcatgatcatttcatcccgccatggactgtcgctaagccaggcatcaatcaacgcaaaaccggtaatcggtttcacttcgtagagcagatcgaaacgcccactaacgggcaaccaacctagcgtgagactacaaaacagcgtcaacagaagcgccagccagaacaccgggatactaaagcccagtaaggcgatggcgttgatcaagttatcctgccacttatggcgcgtaatcccggcaatcatccccacggggatgccaacaatcagcgcaaaaccgaaggcgaggatgcacagttccatcgtcgccgggaagacctcttttaactgttcggcaatcggttgaccgttaatgctggaaacaccaaaatcccagtggatcaggccgttaaaccagaacacccaggcattccacagactcgcgccttgtaacggcgcatgaggggtgaaatagctcaagctgaagccaacgaaggtcagcaggaacaaggtgacaatcaataacaaaatgcggcgtaaggtgaagataatcatggttttttcacctcatcctgtttctcgcgatacaccccagcaaaggaggcgttaccaaacgggctaagtaccagacctttgatatcgtaccgataggcctgcaaacgcaaactgctcgccagcggcaaaatgggcaattcctgcgccagaatactctgcgcttcgtcataggcttcaatacgcgccgccagctgctggctagagagcgccttacgcaatacgctgtcgaatttcggatcgcaccagtgggcgaggttggtctggctatgaattgccgcgcagctcagtaacggacggaagaaactgtccgggtcgttactgtccgtcgcccaaccggataacgtcagatcatggctcatatccatcaaccgcgcctcctgaaagcgaccttctaccggcacaatcaccacttttacgccaacctgcgccatatccgcctgaatcagttcggcagttttcagtggactggggttccacgcctggctacgtgtgggcacccacagtttcagcgttaaattttccagccccaagctcttcaactgttcgcggcttttcgccggattgtattcagtaattttagcctcgttgtcataggcccagctggcgcgcggtaaaatagaggccgccgtttcagccgtaccataatagatggattgcatcaggcgctggttattaatcgccagtgccagcgcatggcggacagcgggattatttagcggcggtttggcggtgttaaatgccagataggcgacgttcatcccaggacgcagcgttaaacgcaagcgcgggtcgtcacgcaaaatggatagctggctggcagcaggccaggccagaacgtcgcattccccggtcaggagtttgctcagacgtccggtgccgccggagcctaaatccaccactacctgcggcattaacggtttaccgcgccagaagtcatcatgacgttgtaggcgaataaattgcccggcgcggtattcgctcaactgatacggaccggtgccgaccggttgacggtcgagttgctcctggcgatcttctttctctaacttccgggcatattctgcgctcatgacgctagcataatgggttgcgaggtgccacaaaaaagaagcatccggctgggcgagtcggaactcaacggtatgattatccagtttgcggacgcttttcacgttatcggcaaattgcaggctgtcgaagtaggggaagttgctgccgttgacgttatgccacgggttgttgcggtcaaaaattcgctggaaggtaaacaccacatcgtcggcattcattttacgagtgggagtaaaccagtcggttttttgaaacggaacatcgcgacgcaggtggaagcgataggtcgcgccgttgtcgagtacttcccagctttcggcaagttccggcatcaggcgataggtatagggatcgacatccagcagtcgatcataaaactgggcggcaagggtatcgacaattaacccactgctcgctttggatgggttaaaggtgttgacttgcccgctgacgcaatagacaaaaccgctgtcgcggatatcagcatgcgggggagattcaggcgcggcgattgcctgaccactcacaagtccagcaatcaccaaaagagagcttaatacctggcgcataatattaagggattttatgtaaagaggctatcttactaatatttaatgacatttgccattaccgtttgtgttcaggggtcgtaatgagggccgtgtggttggtcgttgaacaggtgacgtcgccatctgttcaacattcgtacccgtgatttctctataactataactcacagaacaacttagcgaggagcagagcggtacgatcgtgagaaacccattaaagcacgctgcagtgcgtgtcattgttagccagatgcggcgtgaacgctttatccggacaacgatactgaccgatcgtctgcaattaaatcattactcattaccccattgattcaaaaactctgcgatctcatcaatgcgtacgggattaatccccgcttcagcagccatttcatgttgggcttcttcgctgatctcttcattgttcatcaaacgggtgagcagtaactggaagtagtgggccagcggtgtgcgttcagcctctgcgacaggctctgcgcattcggtcgcgtactcatcggcaatatcaaaatattttagcgggatatcgtggttcattatttgcccctggggttaatgcgctaagcataagggcggatgatagcactcgtgatccgggtcatacatctttttatagttaatggcgcggcgcgttaccctcaggcaggataatgcgccgcgcatccgactattacgtttcactcaccggcgttctgtcaccatcatacaacggcactttgcgatagcggcggatcagataccataaatatgcgccgcctaagctagcccataccagaccgagtgtcagactcgtactctcgaggttaacccacagcacacccaccgtcagcgcgccaaccagcggcatcagcaaatagtggaagtgatccttccagcttttattcattcctttacgccgccagaaatgattaaacacgctcagattcacgaaggtaaacgccaccagagcaccgaagttaattaacgctgtggcggtaactaaatcgaagaacagcgcgctcaacgcgacaatcccgaccataatgacgttgagtgccggagtccgccattttgggtgcacatagccaaacacgcgctccggaaacacattgtcacgccccatcacatacagcagacggctcacgctggcatgactagccaggccagaggctaacgtgttcacaaacgtggtgcagaggaaaatgctctggaagagcttgccgccgacgtacagcgcaatttcaggcagtgcggcatccggatctttaaagcggctgatatcgggaaagaacagctgcataaagaagctcgccgcgataaagataacgccaccgtagaccgccgtcaggaagatggctttcgggatcacgcgtgcggcgtccggcgtctcttcgctaagcgtggtcaccgcatcgaaaccgaggaaggagaaacagacaatcgtcgccccggtaataatcgggatcaggtgcgcgttctcgctgataaacggctgaagactccagacggtgccaacgccttctcctttatgcagtccctgaactaccaggaagataaacaccaccatgatggagatttgcaccagtacaaacagggtattgaagttagcgaccaggttgacgctcttcagattcgcggcggttaaaatggcgacgaaggttaccacccacacccacggcggcacttccgggaagagggcggagagatagattttcgccaacaagacgttaatcatcggcaaaaagagataatccagcaggctactccagccgaccataaatccgacgtgcgggttaatgctcttttgcgcgtaggtataggcgctaccggcctccggaaactggcgaaccagtttgccgtagctgatagcggtaaacagcacacccgccagcgccagcaaataggacgccggaacgtgaccgtcgctaatgccggagacaataccaaaagtatcaaatacggtcatcggcgtgagataggccagacccatcatcaccacctgccacaatttcagactttttcgcagacgggttttgccgggttgcgcagcaatattcagtggactattaatagccataattgctgcctcccctgcgtaataaggtttgcggtcgtgtcgacctgaaatcaaacctgtttagcaagggaagcaaagggggcggagtccagtcagtagcaggaggggcgcatacgcagcctccctcgccatgcggggatttaatcatcggcatcatctcatttcctcgtcacagtcttaatcgttaacggaagcccgttgccgcccgcgctccataacgcgacatccgggaaatgtctggattaccagcaaatgtcaggcctggctccgctcaggccgatgaaacaaccccgcaaggggtattacgcgtttttcaacatccactcaatttctgtttctgtgatgaggcgctcaaactgcaacagctcatcatttttacaggcgtgatagacatggcagaagcgttcgcctaaatagcggcgcaggtgatcattctcgataaactcacccagggcatcgctctggcgaatcggaaagggtaagccttcctgttccagcccgttgccttcgacttcttcctgcaacggcagctcgttatcaaggccatgcaaaataccggcaaaaatcgctgccatcaccagatatgggttggcatcggcacccgccacgcgatattccacgcggtgattatgacggtcgccgcacggaatacgcagggcgacggtgcggttgttatggccccagctcgcctgcgtcggcacatacattcccggctggaagcggcgatagctgttcacgtttggtgccagcaacgccatgctgctcggcatcaggtcaatcatcccggcgagcatctttttcagcagcgggctatcttcgccttccgcgtcagaaagcacgttctcgccacgattattttgcatactgatatggatatgcattccgctgcccgcgtgctcttcatacggcttcgccataaaagtggcgtgcatcttatgcttttctgccatcagacgcaccaggcgttttagtgccagcgcatcatcgcaggcttccagcacgttatcagtatggtaaaggttgatttcaaactgacccgggctggcctcagcgaccgcgccatctgccggaatcagctgtaactgcgccagttcatcaatatcattgagcacgtcggcgaagtggttgaggttatcaacggagtaaacctggctttgtgtattgcggtcatcggtgccaggcgcgcagggcggttgcagatacccttcagcgtcgcgctggcgatccagtaaatagaactccagctctaccgctacgaccgggaacaatccgcgctggcgcagctgctgccacaggcggttaagaacgttccgcggctcaacgtcaaagggagcgccatcttcatcgaccatggtcaggagcatctgaccgataaactctggatcggcggcagaaggagttaaggaaccgagaacaggaacacaggtacgatccggctcgcccatttcctgacccagacctgcttcttctactacgttgcccagaatatccattgcaaatacgctggccgggaaataacaccctttctcgagcttcttcaggctactaacaggaatacgctttccacggaagcaaccatttaaatcggtaagtaaaacatcaacatattgcgtattcgggtagcgctccaggtagcgtttcacttcctgcgtaaaggcgctaccccgcctctcttcactctgctgaacaaagttctctacttcaacgatattggtttccatgattcttcgcctttggtttgttttccgctcgttatcaaagcgtaaaatataatgaccaccattcgaatctgtatgcaaactaaatgtttgtcaaatgttaaattgagtttgcaaaaatgaaaacccactgctagattgaaaaaatattgaacataaaggtcatttaaagcgcagtaatggcgataatttagtccactttgtgagattgagcatggaaaatataatgaacaatccggttatcggtgtcgtaatgtgcaggaacaggcttaagggtcatgcgacccagactctgcaagaaaagtacctgaatgccatcatccatgcaggcggcttgcctattgcgctaccacatgcgctggcggaaccgagtttacttgaacaacttttgccgaaactcgatggcatttatcttcctggtagtcccagcaatgtgcagccgcacctatatggtgaaaacggcgatgagcctgacgccgatcccgggcgtgatcttctgagcatggcgataattaatgccgcactcgaaaggcgcatccccattttcgccatctgccggggtttacaagaactggtggtggcaaccggtggtagcttgcatcgcaagctgtgcgaacagcctgaattgctggaacatcgggaagatcccgaactgccggtggaacagcaatatgcaccgagccatgaagttcaggttgaagaggggggattactgtctgcgttgttacctgaatgtagcaacttttgggtaaactctctacatggacaaggggcgaaggtcgttagcccacggttgcgtgttgaagctcgcagcccggatggcttagttgaggcggttagcgtcatcaatcatccttttgcgctgggcgtacagtggcacccggaatggaacagtagcgagtacgcgcttagccgtatattgttcgagggctttatcaccgcttgtcagcaccatatcgctgaaaaacagcgactctgaccactacagtttaaggaaatgcaaatatgagtgatgagggactggcgccaggaaaacgcttgagcgaaatccgccagcagcaggggcttagtcaacgtcgtgccgccgaactctccgggctgactcacagtgctatcagtacgatagaacaagataaagtcagccctgccatcagtacgctgcaaaagctgctgaaggtgtatggtctgagtctcagcgaattcttttccgagccggaaaaacctgatgagccgcaggtcgtcattaatcaggacgacttaattgagatgggtagtcagggtgtgagtatgaagctggttcataacggtaacccgaatcgcacgctggcgatgatctttgaaacgtaccagccgggcacaaccactggggaaagaattaagcatcagggtgaggaaataggcactgtactggaaggtgaaattgttctgacgattaatggtcaggattaccacctcgtcgcggggcaaagttatgccattaataccggcatcccgcacagtttcagtaatacgagcgcaggtatttgccgaattatcagcgcccatacgcccaccacgttttaatctttttgttctgtaagccgggtaagcgcaatgcgcccggcaatctatacacaaaatcattcaagttgcatcaaggcggcaagtgagcgaatcccgatgagcttactcaggtaagtgattcgggggagcgaacgcagccaaggcagaggcggcttgaaggatgaagtgtatataaagaatgtcgccagaaataaacgggcatacggcccggggatctctgcgccctgacgttcacaaactgcatatatctgatagacgtgaaacaggagtcataatgaattttcatcatctggcttactggcaggataaagcgttaagtctcgccattgaaaaccgcttatttattaacggtgaatatactgctgcggcggaaaatgaaacctttgaaaccgttgatccggtcacccaggcaccgctggcgaaaattgcccgcggcaagagcgtcgatatcgaccgtgcgatgagcgcagcacgcggcgtatttgaacgcggcgactggagtctctcttctccggctaaacgtaaagcggtactgaataaactcgccgatttaatggaagcccacgccgaagagctggcactgctggaaactctcgacaccggcaaaccgattcgtcacagtctgcgtgatgatattcccggcgcggcgcgcgccattcgctggtacgccgaagcgatcgacaaagtgtatggcgaagtggcgaccaccagtagccatgagctggcgatgatcgtgcgtgaaccggtcggcgtgattgccgccatcgtgccgtggaacttcccgctgttgctgacttgctggaaactcggcccggcgctggcggcgggaaacagcgtgattctaaaaccgtctgaaaaaagtccgctcagtgcgattcgtctcgcggggctggcgaaagaagcaggcttgccggatggtgtgttgaacgtggtgacgggttttggtcatgaagccgggcaggcgctgagccgtcataacgatatcgacgccattgcctttaccggtagtacccgtaccgggaaacagctgctgaaagatgcgggcgacagcaacatgaaacgcgtctggctggaagcgggcggcaaaagcgccaacatcgttttcgctgactgcccggatttgcaacaggcggcaagcgccaccgcagcaggcattttctacaaccagggacaggtgtgcatcgccggaacgcgcctgttgctggaagagagcatcgccgatgaattcttagccctgttaaaacagcaggcgcaaaactggcagccgggccatccacttgatcccgcaaccaccatgggcaccttaatcgactgcgcccacgccgacagcgtccatagctttattcgggaaggcgaaagcaaagggcaactgttgttggatggccgtaacgccgggctggctgccgccatcggcccgaccatctttgtggatgtggacccgaatgcgtccttaagtcgcgaagagattttcggtccggtgctggtggtcacgcgtttcacaagtgaagaacaggcgctacagcttgccaacgacagccagtacggccttggcgcggcggtatggacgcgcgacctctcccgcgcgcaccgcatgagccgacgcctgaaagccggttccgtcttcgtcaataactacaacgacggcgatatgaccgtgccgtttggcggctataagcagagcggcaacggtcgcgacaaatccctgcatgcccttgaaaaattcactgaactgaaaaccatctggataagcctggaggcctgaaatgaccgaacataccagcagttactacgccgccagtgcgaataaatatgcaccattcgacacgctgaatgagagtatcacctgcgacgtttgcgtggttggcggcggctataccgggctctcctccgcgctgcatctggcggaagcgggctttgacgtagtggttctcgaagccagtcgcatcggctttggcgcaagcgggcgcaatggcggacagcttgtgaactcctacagccgcgacatcgacgtgatcgaaaaaagctacggcatggacaccgcccgtatgctcggcagcatgatgttcgaaggtggtgagatcatccgcgaacgtatcaaacgttatcagattgactgcgactaccgccccggcggcctgtttgtggcgatgaatgataaacagctcgccacacttgaagagcagaaagagaactgggaacgctacggcaataaacagctggaattgctggacgccaacgccattcgccgtgaagtagccagcgatcgctataccggtgcgctgctggatcacagcggtgggcatattcatccgctaaaccttgccattggcgaagcggacgccatccgcctcaacggcgggcgcgtgtatgaactttctgccgtgacgcagatccagcacaccacgccagccgttgtgcgaactgccaaaggtcaggtgacggcgaagtatgtgattgtcgccgggaatgcgtatctgggcgataaagtagagccggaactggcgaaacgcagcatgccgtgcggcacgcaggtgatcaccaccgaacggctgagcgaagatttagcccgtagcctgatcccgaaaaactactgtgtggaagactgtaactatctgcttgattactaccgtcttaccgccgacaaccgcctgctgtacggcggcggcgtggtctacggcgcgcgcgacccggatgacgttgagcgccttgtggtgccgaaactgctgaaaaccttcccgcagctgaagggcgtgaaaattgattaccgctggacgggcaacttcctgctgaccctgagccgtatgccgcagtttggtcgcctcgataccaacatctattacatgcagggctacagcggccacggcgtgacctgtactcatctagccggacgtttgattgccgaactgctgcgcggcgacgccgaacgtttcgatgccttcgccaatctgccgcattacccgttccccggcgggcgcacgctgcgtgtgccgtttaccgcgatgggcgcggcgtattacagcctgcgcgatcgtctgggcgtttaatttccgattaaccgtgaagagtcaaaaggtgtgaaacatgagcaacaatgaattccatcagcgtcgtctttctgccactccgcgcggggttggcgtgatgtgtaacttcttcgcccagagcgctgaaaacgccacgctgaaggatgttgagggcaacgagtacatcgatttcgccgcaggcattgcggtgctgaataccggacatcgccaccctgatctggtcgcggcggtggagcagcaactgcaacagtttacccacaccgcgtatcagattgtgccgtatgaaagctacgtcaccctggcggagaaaatcaacgcccttgccccggtgagcgggcaggccaaaaccgcgttcttcaccaccggtgcggaagcggtggaaaacgcggtgaaaattgctcgcgcccataccggacgccctggcgtgattgcgtttagcggcggctttcacggtcgtacgtatatgaccatggcgctgaccggaaaagttgcgccgtacaaaatcggcttcggcccgttccctggtagcgtgtatcacgtaccttatccgagtgatttacacggcattagtacacaggactccctcgacgccatcgaacgcttgtttaaaagtgacatcgaagcgaagcaggtggcggcgattattttcgaaccggtgcagggcgagggcggtttcaacgttgcgccaaaagagctggttgccgctattcgccgcctgtgcgacgagcacggtattgtgatgattgctgatgaagtgcaaagcggctttgcgcgtaccggtaagctgtttgccatggatcattacgccgataagccggatttaatgacgatggcgaaaagcctcgcgggcgggatgccgcttagcggcgtggtcggtaacgcgaatattatggacgcacccgcgccgggcgggcttggcggcacctacgccggtaacccgctggcggtggctgccgcgcacgcggtgctcaacattatcgacaaagaaagtctctgcgaacgcgcgaatcaactgggccagcgtctcaaaaacacgttgattgatgccaaagaaagcgttccggccattgctgcggtacgcggcctggggagcatgattgcggtagagtttaacgatccgcaaacgggcgagccgagtgcggcgattgcacagaaaatccagcaacgcgcgctggcgcaggggctgctcctgctgacctgtggcgcatacggcaacgtgattcgcttcctgtatccgctgaccatcccggatgcgcaattcgatgcggcaatgaaaattttgcaggatgcgctgagcgattaatagcccaacgcaataatgtctgatgcgctgcgcttatcaggcctgcaaacgacgtattgattatgtatgccgaataaagcattcacgccgcatccggcaagttgtattgctcaacttcgttaaatctggtgctttttcaacaacgcgcggaactgatgataagttaaccccagtaattcagccgcgcgcttctggttatatttcccttgttgcaaactgagttgcagcaactctttttcctgctgcatctgaaactcacgtaaatccagcggcagtgttggaaggctggtggtttcactaacggcgatagcgtcttcaggcggacgccgtttaaagggatcaataatgatgtcatcaagcggataatcgctggtgccgtggcgatacacactacgttccaccacgtttttcaattcacgaatatttcccggccaacgataattcagcaatgtttctctggcgcgctccgtaaaccccgggaacagaggcagcttgatttcccgacacatctggatggcaaagtattctgccatcaacattatgtcgctttcgcgctcgcgcagtggtggcagttgtacaacatcaaaagccagtcggtcgagcaggtcagcgcgaaaagtgccttcattgaccatcgccgggagatcggcattcgtcgcgcataccaaccgcacattcacctgcaatggttggctgccgccaacgcgctccagttcaccgtactcaatcacgcgcaataatttctcctgcaccatcatcggtgccgtagcgagttcatcaagaaatagcgtaccgccgtcggcacgttcaaatctccctggatgacgtttttgcgcaccggtaaacgcccccgcttcgtgaccaaacagttcggaatccagcagattttcatttaacgccgcgcagttaagggaaataaacggcccttgccaacgggaggagagataatgcaggcggctggcaatcagctctttaccggtgccgcgttcgccgatgatgagcaccggtttgtccagcggtgcgagatggctaacctgttccagcacttcgagaaagctgttcgcctcaccaagtaaattatctttgtattctgccatgatgaaattcgccacttgttagtgtaattcgctaactcatcctggcatgttgctgttgattcttcaatcagatctttataaatcaaaaagataaaaaattggcacgcaaattgtattaacagttcagcaggacaatcctgaacgcagaaatcaagaggacaacattatgggtattttttctcgctttgccgacatcgtgaatgccaacatcaacgctctgttagagaaagcggaagatccacagaaactggttcgtctgatgatccaggagatggaagatacactggttgaagtacgttctactagcgcgcgcgcgttggcagaaaagaaacagctgactcgccgtattgaacaagcgagcgcgcgtgaggttgaatggcaggaaaaagccgaactggcgctgctgaaagagagagaggatctggcacgtgcagcgttaattgaaaaacagaaactgaccgatctgattaagtccctggaacatgaagtgacgctggtggacgatacgctggcacgcatgaagaaagagattggcgagctggaaaacaaattgagcgaaacacgcgctcgccagcaggcattgatgttacgtcatcaggcggcaaacagcagccgcgatgtgcgtcgtcagctggacagtggcaaactggatgaagcaatggctcgtttcgaatctttcgaacgtcgtattgaccagatggaagcggaagcagaaagccacagcttcggtaaacaaaaaagcctggacgatcagtttgccgaactgaaagccgatgatgcaatcagcgaacaactggcacaattaaaagccaaaatgaagcaagacaatcaataataacatccaggcggcgtccgaacgcgccgccgctcatcgtctaaggagtacttatgagcgcgctatttctggctattccgttaaccatttttgtgctgtttgttttaccgatctggttatggctgcattacagcaatcgttctggtcgcagtgaattgagccaaagtgagcagcagcgattagcgcaactggctgatgaagcaaaacggatgcgcgaacgtattcaggcgctggaatctattcttgatgcagaacatccgaactggagggatcgctaatggcgggcattaatctcaataaaaaattatggcgtattccacagcagggcatggtccgcggcgtctgcgccgggattgccaactattttgatgtaccggtaaaactggtgcgtatcctggtggtgctgagcattttcttcggtctggcgctgtttaccctggttgcttacatcattttgagttttgcgcttgatccaatgccggacaacatggcctttggtgagcagctaccttccagcagcgaattgctggatgaagtcgaccgtgaactggcggcaagtgaaacgcgtttacgcgagatggaacgttatgtcacttccgatactttcacgttacgtagccgtttccgtcaactgtgaggaaagttatgaatactcgctggcaacaggccgggcaaaaggtaaagcctggtttcaaattagcaggcaagctggtacttcttaccgcactgcgctatggcccggcgggtgtggcgggctgggcgataaaaagtgttgctcgccgaccgctgaaaatgttgctggctgtggcgctggaaccgctgttaagtcgggctgctaataaactggcacagcgttataaaaggtgaggggagtttcgcaaaaattgttaaatctcaggcgtataatggatggcaattttcatccatagaaggacgcttacatgtttaaaaaaggcttacttgctctggcactggtgtttagtctgcccgttttcgccgctgaacactggatcgatgttcgtgttccagagcagtatcagcaagagcacgttcagggggccatcaatattcccctgaaggaagtgaaagagcgcattgccaccgccgttccggataaaaacgacaccgtgaaagtgtattgcaatgccggacgccagagtgggcaagcaaaagagatccttagcgagatgggatatacccacgttgagaacgccggtggcctgaaagacatcgcaatgccgaaggtcaaaggttaaaagaattcaccatgagcggcgcttatgcgccgtttttttttctgtcacaccttatttacatccccatagattatttgcgtcagctcacaaatacgctttttccctggtaaaaaatgatttcctgcgtgactaaaacccttgtgctcaattgacagtttattttctgcggagtagtctctcgtttcatgggaccgctaccacggaaaggcaacatgaaacagaaaattacggattacctggacgaaatctacggtggaacatttaccgcaactcatttacagaaacttgtaacgcgtcttgagagtgcgaaacgattaattacacagcgacgtaaaaaacactgggatgaaagtgatgtcgtgttaattacctatgccgatcaatttcacagcaatgatttaaaaccattacccacatttaatcagttttaccatcaatggctgcaaagcatttttagtcatgttcatttgttgccgttttatccatggagttctgatgatggctttagcgtaattgattatcatcaggtcgccagtgaagcgggggagtggcaggatattcagcaactcggtgaatgcagtcatttaatgtttgattttgtctgcaaccatatgagcgcaaaaagtgaatggtttaaaaactatttacaacagcatccaggttttgaagatttttttattgccgttgacccgcaaaccgatctcagcgccgtcactcgcccgcgtgcgttaccgttattaacgccattccagatgcgcgatcatagtacgcgccatttatggaccacctttagtgacgatcaaattgacctgaattaccgtagccctgaagtgttgctggcgatggtggatgttttactctgttaccttgcgaaaggtgctgagtatgtccgcctggatgccgttggctttatgtggaaagagccgggaacaagctgcatccatctggaaaaaacacatctgattatcaaactgttacggagcattattgataacgttgcgccaggtacagtgatcattaccgagaccaatgttccgcataaagacaacattgcttactttggcgcaggcgatgacgaagcacatatggtgtaccagttcagcctgccgccactggtgctgcatgcggtgcaaaaacagaacgttgaggcgctttgtgcgtgggcgcaaaacctgacactaccttccagcaacaccacctggtttaacttcctcgcctctcacgatggcatcgggctaaacccgctacggggcttgttgcctgaaagcgaaatattagagctggtcgaggcgttacagcaggaaggtgcattagtaaactggaaaaataatcccgacggtacacgcagtccgtatgaaataaatgtgacctatatggatgcgttaagccgccgtgagagtagcgatgaagaacgttgcgccaggtttatccttgcccatgcgattttgttaagtttccccggtgtgccagcgatatatattcaaagtattcttggcagccgtaatgattacgcaggtgtcgaaaaactcggatataaccgtgcgattaaccgtaaaaaatatcacagtaaagagataacccgagaactgaacgatgaagctacattaaggcatgcggtatatcatgagttgagccgtttaattacacttcgtcgcagccataacgagtttcatccggataataattttaccattgatacgattaatagttccgtaatgcgtattccaagaagtaacgctgatggtaattgtctgactggattgtttaatgtcagtaaaaatattcagcatgtaaatattactaatctgcatggtcgggatctgattagtgaagttgatatattgggtaatgaaataacgctgcgcccctggcaggttatgtggattaaataaaaaggaacatctcatgattaaaagtaaaatcgtgctgttaagtgcactggttagttgcgccctgattagtggctgtaaagaagaaaataaaacgaatgtatccatcgaatttatgcattctagcgtggagcaggagcgccaggccgttatcagtaaattgattgcccgttttgaaaaagaaaaccctggcatcaccgttaagcaagtgcccgtggaagaagatgcctataacactaaagtcattactcttagtcgtagcggtagcctgccggaagtgatcgaaaccagccatgactacgccaaagtgatggacaaagagcagcttatcgatcgcaaagcggttgccacagtcatcagcaacgttggtgaaggcgcgttttacgatggcgtactgcgtattgtgcgtaccgaagatggtagcgcatggaccggtgttcctgtcagcgcctggattggcggtatctggtatcgcaaagatgtgctggcaaaagcggggcttgaggagccgaaaaactggcaacagctgctggacgttgcacagaaactgaatgacccggcgaataaaaaatacggcattgcgctgcctacagcagaaagcgtgttgacggaacaatccttctcccagtttgcgttatccaaccaggctaacgtctttaacgccgaaggcaaaatcacccttgatacaccagagatgatgcaggcactgacctattaccgcgaccttactgccaacactatgccgggttctaacgacatcatggaagtgaaagacgcctttatgaacggcaccgcgccgatggcgatttactccacctatatccttccggctgtgattaaagaaggcgacccgaaaaacgtcggtttcgtggtgccaaccgagaaaaactctgcggtctacggcatgttgaccagcctgaccattaccgccgggcaaaagaccgaagagacggaagcagcagaaaaatttgtcacctttatggagcaggcagacaacattgccgactgggtgatgatgagcccaggtgctgcgctgccggtgaataaagcggtggtgactaccgccacctggaaagacaacgacgttattaaggcgctgggtgaactaccgaatcagctaatcggtgaactgccaaatattcaggtttttggcgcagtaggggataaaaactttacccgcatgggtgatgtgacgggttctggcgtggtgagtagtatggtgcataacgtcaccgtgggtaaagccgatctctctactacgctgcaagcgagccagaaaaaactggatgaactgatcgaacagcactaaacccaggacaggaatccgcaatgaacaggctttttagtggtcgttccgatatgccctttgcgctgctgcttctcgcgcccagcttattactgctgggcggtctggtggcgtggccgatggtgagcaatatcgaaatcagttttttacgtctgccgctcaatcccaacatcgagagtacgtttgttggggtgagcaactatgtgcgtatcctctccgatcccggcttctggcatagcctgtggatgacggtctggtataccgcgctggtggtggcgggcagcaccgtgctcgggctggcggtggcgatgtttttcaaccgcgagttccgcctgcgcaaaaccgcgcgtagcctggtgatcctctcctacgtaacgccgtccattagcctggtgttcgcctggaaatacatgttcaacaacggctacggcattgttaactacctcggcgtcgatcttctgcatctctatgagcaggcaccgctgtggttcgataatccgggcagtagctttgtgctggtggtgctgttcgccatctggcgctacttcccgtatgcctttatcagctttctggcgattttgcagaccatcgacaaaagcctgtacgaagcggcagagatggatggcgctaatgcctggcaacggtttcgtatcgtcacgctgcccgcaattatgccggtcctggcgacggtggtgacactgcgcaccatctggatgttctacatgttcgcggatgtttatttgctgacgaccaaggtcgatattctcggtgtatatctctacaaaaccgcctttgcctttaatgatttaggaaaagcggcggcgatcagcgtggtgctcttcatcattattttcgctgtcattctgctgaccaggaaacgggtgaacctcaatggcaacaaataaacgcacactcagtcgcatcggtttttactgcgggctggcgctgtttctcatcatcacgctgtttccattttttgtgatgctgatgaccagcttcaagggcgcgaaagaggcgatcagtctgcatcctacgctgctgccgcagcagtggacgctggagcattacgtcgacatttttaacccgatgattttcccgtttgtcgactacttccgtaacagtctggtggtgtctgtggttagttccgtggtggcggtattcctcggcattcttggggcttacgcgctttcccgcctgcgctttaaaggtcggatgaccatcaacgccagcttttacacggtgtatatgttctctggcattttgctggtggtgccgcttttcaaaatcatcaccgcgcttggcatttacgacactgagatggcgctgatcatcaccatggtgacgcaaactctgcccaccgccgtgtttatgctgaaaagctacttcgacaccatccccgatgagatcgaagaagcggcgatgatggatggcctcaaccgtctgcaaattatcttccgcatcaccgtgccgttggcgatgtccgggctgatatccgtgttcgtctactgctttatggtggcgtggaacgactatctgtttgcgagcattttcctctccagcgccagcaatttcaccttaccggtgggcctgaacgcgctgttcagtacgccagattacatctggggacggatgatggcggccagtctggtgaccgcattgccggtggtgattatgtatgcgcttagcgaacgttttattaagagtggtttgaccgccggtggcgtgaagggctaaagcggccagtttctttacaaggagttttaaatgaaaaagttagtagccacagcaccgcgtgttgctgcgctggttgagtatgaagatcgggcgattttagctaatgaagtgaagatccgcgtgcgtttcggcgcaccgaaacacggaacggaagtggtcgacttccgcgccgccagcccgtttattgatgaagactttaacggcgaatggcagatgttcactccgcgtccggcagatgcgccgcgcggcattgagtttggcaaattccagcttggcaacatggtggttggcgacattatcgagtgcggcagcgacgttaccgactacgcggtgggcgacagcgtatgcggctacggcccgctctccgagacggtcatcattaacgcagtgaataactacaagctgcgcaaaatgccgcaaggcagctcctggaaaaacgccgtctgctacgacccggcgcagtttgccatgagcggcgtgcgcgatgccaacgtgcgcgtaggggattttgtggtggtggtagggcttggcgcaatcggtcaaattgccatccaactggctaaacgcgctggcgcttctgtggtgattggcgtcgatcctatcgcccatcgctgtgatattgcccgtcgccacggcgcggatttctgccttaaccccatcggcactgatgtaggtaaagagatcaaaacgctgaccggcaagcagggtgccgatgtgattatcgaaaccagcggctacgccgacgcgctgcaaagcgcgctccgcggtctggcttatggcggcaccatctcctatgtcgcgtttgccaagccgtttgccgaaggttttaacctcggacgcgaagcgcatttcaataacgccaaaattgtcttctctcgcgcgtgcagcgaaccgaacccggattatccgcgctggagccgcaagcgtattgaagaaacctgttgggaactgctgatgaacggttatctcaattgcgaagatttaatcgacccggtggtgacctttgccaatagcccggaaagctatatgcagtatgtcgaccagcatccggaacagagcatcaaaatgggcgttacgttttaattcaaaggaatgaaaaaaatgaaaatcggcacacagaatcaggcgttctttccggaaaacattctggagaaatttcgttatatcaaagagatgggcttcgatggttttgagattgacggcaaactgctggttaacaacatcgaagaagtcaaagcggcgatcaaagaaaccggtttaccggtgaccaccgcctgcggtggctatgacggatggattggcgactttatcgaagagcgtcgtcttaatggcttaaagcagatcgagcgcattctcgaagcgctggcagaagtgggcggtaaaggcatcgtcgttccggctgcgtggggcatgtttaccttccgcttaccgccgatgaccagcccgcgtagcctggacggcgaccgcaaaatggtgagtgattccctgcgcgtactggaacaggtcgccgcgcgtaccggaaccgtggtgtatctcgaaccgttaaaccgctatcaggatcatatgatcaacaccctcgccgatgcccgccgttacatcgtcgaaaacgatcttaaacatgtacagattatcggcgatttctatcacatgaatatcgaagaagataacctggcgcaggcgctgcatgacaaccgcgacctgctcggtcatgtgcatattgcggataaccatcgctaccagccgggcagcggcaccctggatttccacgcgctgtttgaacagctgcgcgcggataactatcagggctatgtagtgtacgaagggcgtatccgggcggaagatcctgcccaggcgtaccgtgatagcttggcctggttgcgtacctgctaagaggtctttgtgaaaagtgcaatgacaagctctccgctgcgggtcgcgataataggcgcaggccaggtggcggataaggttcatgctagctactactgcacccgcaacgatctggaactggtggctgtctgtgacagccgcctttcccaggcgcaggcgctggcagaaaaatacgggaatgcatccgtgtgggacgatccgcaggccatgctgctggcggtgaaacctgatgtggttagcgtctgcagtcctaaccgttttcattacgaacataccctgatggcactggaagcgggctgccatgtgatgtgcgaaaaaccgcccgccatgacgccagaacaggcgcgggaaatgtgcgataccgcgcgcaaactgggcaaggtgctggcctacgactttcaccatcgttttgcgctcgatacgcaacagctgcgtgaacaggtgaccaacggcgttttgggagagatttacgttaccaccgcccgcgccctgcgtcgctgcggcgttcccggctggggtgtctttaccaataaagaactgcagggtggtggcccgctgatcgacatcggcattcatatgctggatgctgcgatgtatgtgctgggctttccggcggtgaaaagcgtgaatgcgcatagctttcaaaagatcggcacgcaaaagagctgtggtcaatttggtgagtgggatccggcaacttacagcgtcgaagatagcctgtttggcaccattgaatttcataacggcggcattctgtggctggaaacgagttttgcactcaacatccgcgaacagagcattatgaacgtcagcttttgtggtgataaagctggtgcgacgctgtttccagcacatatctacaccgataacaacggtgaattaatgacgctgatgcaacgggaaatagcagacgacaaccgccatttgcgcagcatggaagcctttatcaatcacgtacagggcaagcccgtgatgatagccgacgccgagcaggggtacatcatccagcaactggtggcggcgttgtatcaatccgcagaaacagggacgcgtgtggaattatgaccaggccagtaacgttaagtgaaccccatttcagccagcataccctgaacaagtatgcaagcctgatggcgcaggggaacggctatcttgggcttcgcgccagccatgaagaagattacacgcgccagacgcgagggatgtatctggcggggctgtatcatcgggcgggaaaaggtgaaatcaacgaactggtgaacctgcctgatgtcgtggggatggagattgccataaatggtgaggttttcagcttatcccacgaagcctggcagcgtgagcttgactttgccagtggcgaattacgccgcaatgttgtctggcgtaccagcaacggcagtggttacaccatcgccagccgtcgctttgttagcgcagaccaactgccgctcattgcgctggaaatcactattacgccactggacgccgacgcgagtgtgctgattagtacaggcattgacgccacgcaaaccaatcacggtcgccaacatctcgacgaaacccaggtgcgggtgtttggtcagcatctgatgcaggggagctacaccacccaggatggacgcagtgatgtggccatcagctgttgctgtaaggtgagcggtgatgtgcagcaatgctataccgccaaagagcgccgtttactgcaacataccagtgcgcagcttcatgcaggcgagacaatgacgttgcaaaaactggtgtggatcgactggcgggatgacaggcaagctgctttagacgagtggggcagcgcgagccttcgccagcttgaaatgtgcgcgcagcagagttacgaccaacttcttgcagcaagtacagaaaactggcgtcaatggtggcagaaacgtcgtatcacggtaaatggcggcgaagcgcacgatcagcaagcgttagattatgcgctttatcatctgcgcatcatgacgcctgcccacgacgagcgcagcagcattgcggcaaaaggcttaaccggcgaaggctacaaaggccacgttttctgggatacagaagtatttttgttaccgtttcatctgtttagcgatccgacggttgcccgaagtttactgcgttatcgctggcacaacttgccaggcgcgcaggagaaagcgcgacgcaacggctggcagggcgcgctatttccgtgggaaagcgcgcgcagcggcgaagaagagacgccggaatttgccgccattaacattcgcaccgggctgcggcaaaaagtggccagcgcgcaggcggaacatcatctggtggccgatatcgcctgggcggttattcaatactggcagaccacgggggatgaaagtttcattgcgcatgaaggcatggcgctacttctggagacggcaaagttctggattagccgcgcggtgagagttaacgatcgtctggaaattcatgatgttattgggccagacgaatataccgaacatgtcaataataatgcatacaccagctatatggcccgctacaacgttcaacaggcgctgaatattgcccgccagttcggctgtagcgacgatgcgtttatccatcgcgccgaaatgttcctcaaagagctatggatgccagaaattcagcccgacggcgttttgccgcaggatgatagctttatggctaagccggcgattaatctggcgaaatacaaagcggcggcggggaagcaaaccatactgctggattatagtcgcgcagaagtgaacgagatgcagatcctcaaacaagctgatgtggtgatgctcaattacatgctgccggagcagttcagtgcggcaagctgtcttgccaatctgcaattttatgaaccgcgcactattcacgacagcagtttaagtaaagcaatccacggcattgttgccgcacgctgtggcctgctgacccaaagttatcagttctggcgcgaggggactgaaatcgatcttggtgctgatccgcatagttgtgatgatggtatccatgctgccgcaactggcgctatctggctgggggcgattcagggttttgccggggtgagcgtgcgtgacggtgaattgcatctcaatccggcgttacctgagcagtggcaacagttgtctttccctctgttctggcagggctgcgaattacaggtcactcttgacgcgcagcgtattgcgattcgaacttctgcgcccgttagtctgcgtttgaacggtcagcttataaccgtggctgaagaatctgttttctgtttgggtgattttattttgcccttcaatgggaccgctaccaaacatcaggaggatgaatgaaactgcaaggggtaattttcgatctggatggtgtaatcaccgataccgcgcatctgcatttccaggcgtggcagcagattgccgctgaaattggcatcagcattgatgcgcagtttaacgaatccctaaaagggatcagccgcgatgagtctctgcggcgcattctgcaacacgggggcaaagagggcgactttaacagccaggagagggcgcaactggcgtatcgcaaaaatctgctctatgtccacagtctacgcgagttgacggtcaacgctgttctacccggcattcgctctttgctggcagatctccgtgcacagcagatcagcgttgggctggcttctgtctccctgaatgcgccgacgattttagcggcgctggagctgcgcgagtttttcaccttctgcgcggatgcttcccaacttaaaaacagcaaaccggacccggaaatctttctcgccgcctgtgcagggctgggcgtgccgccgcaggcatgtatcggcattgaagatgcgcaggcgggcattgacgccattaacgccagcggtatgcgcagcgtggggatcggcgcgggcttaaccggggcgcaattactgttgcctagtacggaaagtctcacctggccgcggttaagcgccttctggcaaaacgtataacaaaggaatcaacatggctcagcttagcttacaacatattcaaaaaatctacgataaccaggtgcatgtggtgaaggacttcaacctggaaattgccgataaagagttcatcgtgtttgtcggcccgagcggctgcggtaagagcaccaccctgcgcatgattgccgggcttgaggagatcagcggcggcgatctgttgatcgacggcaaacgaatgaatgacgttccagccaaagcacgcaatatagcgatggtgttccagaactacgcgttgtatccgcatatgacggtttacgacaacatggcgtttggtctgaagatgcaaaaaatcgccaaagaggtgattgatgagcgggtgaactgggcggcgcaaattctcggcctgcgtgagtacctgaaacgtaagccgggggcgctttccggcgggcaacgtcagcgagtggcgcttgggcgggcgattgtacgcgaagcgggcgtgtttttaatggatgaaccgctctctaaccttgatgccaagctgcgcgtgcaaatgcgcgcagagatcagcaagctgcatcagaaactgaacaccaccatgatctacgtgacccacgatcagaccgaagcgatgaccatggcgacgcggattgtgattatgaaagacgggattgttcagcaagtaggtgcgccgaaaaccgtttataaccaacccgcgaatatgtttgtttccggatttattggaagtccagcgatgaattttattcgcggcacgatcgatggcgataaattcgttacggaaacgcttaaattaaccattcccgaagagaaattagcggttctgaaaacacaggaaagtttgcataagcccatcgtgatgggaatacgaccggaagatattcatccggacgcgcaagaggaaaataacatttccgccaaaattagcgtggcagaattaaccggtgcggaatttatgctctacaccacggttgggggcacgagttaaacggttgggggcacgagttagtggtccgtgctggtgcgttaaatgattatcatgcaggagaaaatatcactattcattttgatatgacgaaatgtcatttctttgatgcagaaacggaaatagcaattcgctaaatacagggggaaggcattcccccaggataatacaaggaacaataatgaaaaagttattaccctgtaccgcactggtgatgtgtgcgggaatggcctgcgcacaggccgaggaaaggaacgactggcactttaatatcggcgcgatgtacgaaatagaaaacgtcgagggttatggcgaagatatggatgggctggcggagcctagtgtctattttaatgccgccaacgggccgtggagaattgctctggcctattatcaggaagggccggtagattatagcgcgggtaaacgtggaacgtggtttgatcgcccggagctggaggtgcattatcagttcctcgaaaacgatgatttcagtttcggcctgaccggcggtttccgtaattatggttatcactacgttgatgaaccgggtaaagacacggcgaatatgcagcgctggaaaatcgcgccagactgggatgtgaaactgactgacgatttacgtttcaacggttggttgagcatgtataaatttgccaacgatctgaacactaccggttacgctgatacccgtgtcgaaacggaaacaggtctgcaatataccttcaacgaaacggttgccttgcgagtgaactattatctcgagcgcggcttcaatatggacgacagtcgcaataacggtgagttttccacgcaagaaattcgcgcctatttgccgctgacgctcggcaaccacagcgtgacgccgtatacgcgcattgggctggatcgctggagtaactgggactggcaggatgatattgaacgtgaaggccatgattttaaccgtgtaggtttattttacggttatgatttccagaacggactttccgttagcctggaatacgcgtttgagtggcaggatcacgacgaaggcgacagtgataaattccattatgcaggtgtcggcgtaaattacagcttctgataatgggctaaattgccggatgcggcgcgagtactttatccgatctataaatgtaggccggataagatgcgctagcatcgcatctggcattcaggcaaggtagctggtatttatttcagcgtcatatgcgtggcaacggtaatattctgtggactcggttttccagaaattaagcggaataataactcgcagctttgttgacctaactcctgcgtcggaacatcgatgccgcccggtgcaggcgttaaaataaaactcagcgtttcattgctataacccaccaccgctaactgctgcggaatagcaatatttttctctgctgccgcacgataaatgctcattaatttcaggctgtcagtggcaaacaccgcctcaggcaacggactctggcttaataattgccgtgctgcttttaatgcagtttcatgggtataaccgccatcaacaatccattcatcacgcactgcaatattatgcgcagccaggctctgcttataaccattaacgcgatcaacgctaacatggacatcaagcggagcatgcaggcaggcaatattttgatgcccactttcaattaatgcatcggtcaacgcaatgctgtcgccaaaattatcggtatcgacagaataaacatgggcatattgaccttcaactttgccaatcaccaccaccggaatatcatatttatcgagttgggcaaaaaaactctcatccgctgggctactgagcataataatgcctttaatcattttctgcttaattttgctttcgcatttttgcagatcttctgccggattgtggctcgtttgtaatatcacgtcgaaaccttcttcttcagctttggcggtgatggcatgcaaaacttcagagaaaaacggattacccgccgtagttttggtgctacgggtagaaatcaccataatggcatcaaaaccgctagaggtcagcgcgcgggccagcttgtttggctgatactgtaattcttcaatggcccgtaacactttttcgcgcgcttccggggagatattagtttgcttattcagcacgcgacttacggtggatttacttacgcctgcaaccctggcaatatcataaatagtaggggacataggtcaggaactccgtccgaacgtgaatgctgcacatcttatggagttcgccggtcgatgacaacacgggcagttgataatcaatggcctggcccccacattcatatccttacgaatgattttttttctggtcttcagagcagcacaggacagcaatgaagcgacttaaaaatgaactcaatgcgctggtgaatcggggtgtcgacagacatctgcgcctcgctgtaaccggacttagccgcagcggcaaaacagcgtttatcaccgcgatggttaatcagttgcttaatattcacgccggagcacgtttgccgctgttaagtgcggtgcgtgaagagcgcctgctgggcgtgaaacgcattccccagcgtgactttggcattccgcgcttcacctatgacgaagggctggcgcagttatatggcgatccacccgcctggccaacgccaacgcgcggcgtcagtgaaatccgcctggcgctacgttttaaaagcaatgatagcctgctacgccactttaaggatacctccacgctgtatctggaaattgtggattatcccggcgaatggttgctcgacctgccgatgctggcgcaggactatttaagctggagccgccagatgacgggcttactcaatggtcagcgcggagaatggagcgcgaaatggcgaatgatgagcgaagggctggacccgctagcgcctgccgacgaaaaccggctggcggacattgccgccgcgtggaccgattatctccaccactgtaaagagcaggggctgcactttattcagcctgggcgctttgtcttgccgggagatatggcaggtgcgcccgcgctgcaattcttcccgtggccggatgtcgatacctggggcgagtccaaactggcgcaggccgataagcataccaatgccggaatgctgcgcgagcgctttaattattactgcgagaaggtggtgaaggggttctataagaatcattttctgcgctttgaccgccagattgtgctggtggattgcctgcaacctctcaacagtgggccacaggcatttaatgatatgcgtctggcactgacgcagctgatgcaaagttttcactacgggcagcgtaccctgttccggcgtttgtttagcccggttatcgataagctattgtttgctgccactaaagcggaccatgtgaccatcgatcagcacgctaatatggttagtttactgcaacaactgattcaggatgcctggcaaaatgcggcgttcgaagggatcagcatggactgcctggggctggcgagtgttcaggcgaccaccagcggcattattgatgttaacggtgagaaaatcccggcgctgcgtggtaatcgacttagcgatggcgcaccgctcactgtttatcctggcgaagttcccgcacgtttgcctggtcaggcgttctgggataagcaaggcttccagtttgaggcatttcgtccgcaggtgatggatgtcgacaaaccactaccgcatattcgtcttgatgctgcgctggaatttttaataggagataaattgcgatgaccgaaccgttaaaaccacgtattgatttcgacggtcctctggaggtcgatcagaatcctaaattcagggcgcagcagacctttgacgaaaatcaggcgcaaaattttgccccggccacgctcgacgaagcgcaggaagaagaggggcaagtcgaagcggtaatggacgcagcgttacgtccgaaacgcagcctgtggcgcaaaatggtgatgggagggctggctctgtttggcgcaagcgttgtcgggcagggtgtacagtggacaatgaatgcctggcaaacccaggactgggtggcgctgggtggatgtgccgctggggcattgattatcggcgctggcgtaggttctgtggtaacagagtggcggcgcttatggcgcttgcgacagcgcgcccatgaacgcgacgaagcgcgtgatttattgcatagccacggcacgggcaaaggccgcgcattttgcgaaaaactggcgcagcaggcgggtattgatcagagccatccggcgctgcaacgctggtatgccagtatccatgaaacgcaaaacgaccgtgaagtggtcagcctgtatgcgcatttggtccagccagttttagatgcccaggcgcggcgcgaaatcagccgtagcgcggcggaaagtacgttgatgattgcggtcagcccgctggcgttggtcgatatggcgtttatcgcctggcgcaatctgcgtttaattaatcgcatcgccacgctgtatggcattgaactggggtattacagccgtttgcgtctgtttaagctggtattgctgaatatcgcttttgccggagccagcgaactggtgcgcgaagtggggatggactggatgagccaagatctcgctgctcgtttgtctacccgcgcagctcaggggattggtgcaggacttctgacggcacgactcgggattaaagctatggagctttgccgcccgctgccgtggattgacgatgacaaacctcgcctcggggatttccgtcgtcagcttatcggtcaggtgaaagaaacgctgcaaaaaggcaaaacgcccagcgaaaaataatgcaatatcgggtgctgaccggatatctttacgccgaagtgcccgtttttccgtctttgtgtcaatgattgttgacagaaaccttcctgctatccaaatagtgtcatatcatcatattaattgttcttttttcaggtgaaggttcccatgcgtctggaagtcttttgtgaagaccgactcggtctgacccgcgaattactcgatctactcgtgctaagaggcattgatttacgcggtattgagattgatcccattgggcgaatctacctcaattttgctgaactggagtttgagagtttcagcagtctgatggccgaaatacgccgtattgcgggtgttaccgatgtgcgtactgtcccgtggatgccttccgaacgtgagcatctggcgttgagcgcgttactggaggcgttgcctgaacctgtgctctctgtcgatatgaaaagcaaagtggatatggcgaacccggcgagctgtcagctttttgggcaaaaattggatcgcctgcgcaaccataccgccgcacaattgattaacggctttaattttttacgttggctggaaagcgaaccgcaagatagccataacgagcatgtcgttattaatgggcagaatttcctgatggagattacgcctgtttatcttcaggatgaaaatgatcaacacgtcctgaccggtgcggtggtgatgttgcgaagtacgattcgtatgggccgccagttgcaaaatgtcgccgcccaggacgtcagcgccttcagtcaaattgtcgccgtcagcccgaaaatgaagcatgttgtcgaacaggcgcagaaactggcgatgctaagcgcgccgctgctgattacgggtgacacaggtacaggtaaagatctctttgcctacgcctgccatcaggcaagccccagagcgggcaaaccttacctggcgctgaactgtgcgtctataccggaagatgcggtcgagagtgaactgtttggtcatgctccggaagggaagaaaggattctttgagcaggcgaacggtggtagcgtgctgttggatgaaataggggaaatgagtccacggatgcaggcgaaattactgcgtttccttaatgatggcactttccgtcgggttggcgaagaccatgaggtgcatgtcgatgtgcgggtgatttgcgctacgcagaagaatctggtcgaactggtgcaaaaaggcatgttccgtgaagatctctattatcgtctgaacgtgttgacgctcaatctgccgccgctacgtgactgtccgcaggacatcatgccgttaactgagctgttcgtcgcccgctttgccgacgagcagggcgtgccgcgtccgaaactggccgctgacctgaatactgtacttacgcgttatgcgtggccgggaaatgtgcggcagttaaagaacgctatctatcgcgcactgacacaactggacggttatgagctgcgtccacaggatattttgttgccggattatgacgccgcaacggtagccgtgggcgaagatgcgatggaaggtagcctggacgaaatcaccagccgttttgaacgcagcgtattaacccagctttatcgcaattatcccagcacgcgcaaactggcaaaacgtctcggcgttagtcataccgcgattgccaataagttgcgggaatatggtctgagtcagaagaagaacgaagagtaagcgcgaatatgcctgatggtgcaacaccatcaggcatattaaattatgctttcagtacagccagagctgcttcgtaatccggctcggtggtgatttcatccaccagctggctgaaaatcacattgtcattttcgtcaataaccacaacggcacgcgctgccagacctttcagtgggccatcagcaattgccacaccgtaagcttgcagaaattcagcgttacggaaagtggagagggtgataacgttgttcagaccttctgcgccgcagaaacgagactgggcgaacggcagatcggcagagatacacagcacaacggtgttgtcgatctcagttgccagttggttaaacttacgtacacttgcggcgcaaacaccggtatcaatactcgggaaaatgttcagcactttgcgtttacccgcaaactgaccgagggtgacgtcagacagatcttttgccacgagagtaaaagtctgcgctttgctacccgcctgcgggatggaattggcgactgtaaccgggttgccctggaaatgaacggtttgactcatgattatctttcctgtttacatatagttaacgtcacacctagtttatgctaactgtcaataacacagcaaacgctattacagggtctccttacaacaactgtcaacgcagtttgtaattaaaagattaacccatatctggtgaatgaaacagtgatgaaccttctgccagatcaataaatcagaaaaatttaatgatatgacagaaggatagtgagttatgcggaaaaatcaggcaacgttacgcgtatgaccagcaagctgggccagcgcatcgttattttcgatggtgatgtatttacctttgactgccagcatgccgcttttctggaagcgacccagcagacggctgatggtttctaccgtcaggcccagatagttaccgatatcgccacgagtcatcgtcaggcggaattcacgaggggagaagccgcgttgggcaaaacgacgggacaggttgtagatgaatgcagccagacgttcctcggcatttttcttgctcaacagcaggatcatgtcctgatcgcctttgatttcaccgctcatcagacgcatcatctgctgacgcagattcggcattttaccggacaaatcgtccagcgtttcgaacgggatttcacataccatgctggtttccagcgcctgcgcgaagctcgggtgatggccgctgccgatggcgtcaaatcccaccaggtcgcctgctaaatggaaaccagtgatttgctcgtcgccttgctcagtgatggtataacttttaatcgtaccggagcggatggcataaaggcttttaagttcatcaccagccttaaacagcgtctggcctttctgaataggcttcttccgctcaatgatattatcaagctgatcaagctcatgttcgttgagtgtgaacgggatgcaaagctggctgatgctgcaatcctggcaatggatagcacaaccgccagactgaatgcgccgtataattcgcttttccgggatcataggtctgctcaagccgtaattgatatttgtcaattttaacatctttttagggagcaagtaagtctaagcaaaccttaacagcagagaattccgatattagatgtaaatatatgtctatctatttgaaaacccttaagttgttaagggtaactttacataaaagtgtgaacaagctggcacaaattgtttaatgtttacagcaaaagataaccttcatggcgcaataaccactcttttcgctgaactccgcctgcatatccggtcatggtgccgtttcggccaataacccgatggcaaggtacgacgatgctgatgggattgcttccgtttgccgcaccaacggcacgcgccgcgccaggacggcccaattgctcagccagttggccgtaatgcattacctgcccgcaggggatagtgcgtagtgttttccagacttcgcgctgaaatggcgtcccccccgtagcagtgggaagcgtatcaataatgctaagattaccggcaaaatattcacgaagcttgtcgcttaaaccgcctggattggtggcagaaatgcgctcatagccttctttgcgataatggatgtccagcagctgcaccatgcgttcgctgtactcttcccattcaaccgcccgcaggcgaaattgctcatcgcaaatcacccacagtggacccagtggcgtggcaattttttcttcaagtaatctcagcatccgttctctcttaagacaaacgtgggtaaatacccggacctatcggcagaccgacaagataccacgccagcacatcgcagccatactatgcagaaacaatgctgtcgatggctgcttttgcgtcagactgtgctttcgctgccatttccggaccgtatgcgatcccttcggcgaagacaaatttcacatcggtaatgccgataaagccgaggaacgtggacagatacggcgtcaccaggtccgttggtccatctttgtggatcccgccgcggctggtaataacgatggcttttttacccgttaccagaccttccggaccgttctcggtatagcggaaagtaacgcctgcgcgggcaaccaggtcaaaatagtttttcaactgagtcgagatgttgaagttatacatcggtgccgcaataacgataacgtcgtgggctttcagctcggcaatcaactcatcggaaagtgccagagcttcctgctgacgcggagtcagcggcgcatcgctcggacgcagagcgccaaccagttcgccatccagtaccggaatcggatttgcagccaggtcgcgaacggtgatttcatcagcggagtgcttttcgcgccattgttcaacaaaataatcggacaactgattagactgagagtaccctgccaggatgctggatttaagaactaataccttgctcatggtgtttccttatagatgtttgaatgggcgatgccccgttgcttgttgacactttattcacaatcctgccacagagatagcgcaataaatcgaagcctatgttcgaatttattgaacaacgcatagaaagccgcgatgtggtactctatatctatcatttaaaagaaaattaatcaggcagactactgcccactaacgttatgacagaacaacaaaaattgacctttacggccttgcagcagcggctggattcgctgatgctgcgtgacagactgcgtttttctcgccgtctgcacggcgtgaagaaggttaaaaatcctgatgcacaacaggccattttccaggagatggcgaaagagattgaccaggcggcagggaaagtcctgctgcgtgaagcggcacgaccggaaattacttatcctgacaatttaccggttagtcagaaaaaacaggacattctcgaagcgattcgtgatcaccaggtggtgatcgtcgccggggaaacgggttctggtaaaacgactcagttaccgaaaatctgtatggagctggggcgcgggattaaaggactgatcggccatacccagccgcgtcgtctggcggcaagaacagtggcgaaccgtattgcggaagagctgaaaacggagccgggcggttgcatcggttacaaagtgcgtttcagcgatcacgtaagtgataacacgatggtcaagctgatgaccgacggtatcctgctggcggagatccagcaagaccgcctgctgatgcagtacgacactatcattattgacgaagcgcacgaacgcagcctgaatatcgattttttgctcggctatttgaaagagttgctgccgcggcgtcctgacctaaaaatcattatcacttccgcgactatcgacccggaacgctttagccgccactttaataatgcgccgattattgaagtctccggtcggacctatccggtggaagtgcgctatcgcccgattgttgaagaagccgatgacaccgagcgcgatcagttgcaggcgatttttgacgccgtagacgaactgagtcaggaaagccatggcgacattctgatctttatgagcggcgagcgggaaatccgcgataccgccgatgcgctgaacaagctgaacttacgccataccgaaatcttgccgctttatgcgcggcttagcaacagcgaacaaaatagggtattccagagccacagcggacggcgcattgtgctggcgaccaacgtcgcggaaacgagcctgaccgtaccggggattaaatacgttatcgaccccggtacagcgcgtatcagccgctacagctatcgcaccaaagtgcagcgtttgccgattgagccgatttcccaggcgtctgccaatcagcgtaaaggccgctgtggtcgtgtgtccgaagggatctgtattcgtctctattccgaagacgatttcctcagccgcccggagtttaccgatccggagattctgcgtaccaacctggccagcgttattttgcagatgaccgcgctggggctgggcgatatcgctgcgttcccgtttgtcgaagcaccggataaacgcaatatccaggatggcgtgcgtctgctcgaagagctgggcgcgatcaccactgatgaacaggccagcgcctataaactgacgccgctcggtcgccagctcagccagttgcctgtcgacccacgtctggcgcgtatggtgctggaagcgcaaaaacatggctgcgtgcgtgaggcgatgattatcacgtccgcgctctccattcaggatccgcgcgaacgtccgatggacaaacagcaggcaagcgacgaaaaacatcgtcgcttccacgacaaagagtctgactttctcgcgtttgtgaatctgtggaattatcttggcgagcagcaaaaggcgctttcttccaacgccttccgtcgcctgtgtcgtaccgattatctcaactatctgcgcgtgcgcgaatggcaggatatctacacccagttgcgtcaggtggtgaaagaacttggcattccggttaacagcgaaccggcggagtatcgcgaaattcacattgcgttgctgaccggtttactttcccatatcggcatgaaagatgccgataaacaagaatataccggcgcacgtaacgcgcgtttctccatcttccccggttctggtttattcaaaaaaccgcctaaatgggtaatggtggcggaactggtagaaaccagccgcctgtgggggcgcattgctgcgcgtatcgacccggaatgggtggagccagttgctcagcatttgattaaacgcacctacagcgaaccgcactgggaacgggcgcagggcgcggtgatggcaacggaaaaagtcactgtttatggtttgccgattgttgccgcgcgcaaggtcaactacagccagatcgatccggcgttatgtcgtgaactctttattcgccacgcgctggtggaaggtgactggcagacgcgtcacgcattcttccgtgaaaacctgaaactacgggcggaagtagaagagctggaacacaaaagtcgtcgccgcgatattctggttgatgacgaaacgttgtttgagttctacgaccagcgcatcagccacgatgtaatctccgctcgccacttcgacagctggtggaaaaaagtcagccgcgaaacgcctgatttgctcaactttgaaaaaagcatgttgatcaaagagggcgcagaaaaaatcagcaagctggattacccgaacttctggcatcagggcaatctcaagctgcgtttgagctatcagtttgagcccggcgcggatgctgacggtgtgaccgtacatattccgctgccgttacttaaccaggttgaggaaagcgggtttgaatggcagatccccggtctgcgccgcgaactggtgattgctctgattaaaagcttgccgaaaccggtacgccgtaattttgtacccgcgccaaactatgccgaagcgtttttaggccgcgtcaaaccgctggagttaccgttgctcgacagccttgagcgcgagttacggcggatgaccggcgttaccgttgaccgcgaagactggcactgggatcaggtgcccgatcacctgaaaattaccttccgcgtggtggatgacaaaaacaagaagctaaaagaagggcgcagcctacaagatctgaaagatgcgctgaaaggcaaagtgcaggaaacgctatctgcggtggcggatgacggtatcgagcagagcggcttacatatctggagttttggtcagctgccggaaagctacgaacagaagcgtggcaactacaaagtgaaggcgtggccggcgctggtggatgagcgcgacagtgtggcgatcaaactgtttgataacccgctggagcaaaagcaggcaatgtggaacggtcttcgccgtctactgctgctgaatattccaagcccaatcaaatatttacatgaaaagttaccgaacaaagccaagctgggactgtactttaacccgtatggcaaagtgctggagctgatcgacgactgtatctcctgcggtgtggataaattgatcgacgccaatggtggcccggtctggacggaagaaggctttgctgcgctgcatgaaaaagtgcgtgccgaactgaacgacacggtggtggatattgcgaagcaggtcgagcaaatccttacggcagtgttcaatatcaacaaacgtctgaaagggcgggtggatatgaccatggcgctggggctttctgacattaaagcgcagatgggcgggttggtatatcgcggttttgtcactggtaacggcttcaaacggctgggcgacacgctgcgatatttgcaggcgattgaaaaacggctggaaaaactggcggttgatccacatcgcgaccgtgcgcagatgctgaaagtcgaaaacgtccagcaggcgtggcagcaatggatcaacaaactgccgcccgcacgtcgtgaggatgaagacgtgaaagagatccgttggatgatagaagagttgcgcgttagttacttcgctcaacaacttggtacgccttatccgattagtgataagcgtattttgcaggcgatggagcagattagcggttaaccctgctatttgcctgataaagaaaaaacccggtaagcatttagcgccgggttttttattaattctaaaacggtaagggtaaaaattcaggaattcagaaaaatacaattctctgctgcaagatgaataatgtttatctacagcatttccttaaaagatatgtcaggcttgcggagtggcggttaaggacatacgatttcctcctttcagagtgctccgcttctcactattatctcacgcagtattcttaagggaacgataaggaggaaccatgaacattaccccgtttccgacgcttagcccggcaactatagatgccataaatgttatcggacagtggctggcgcaggatgatttctccggtgaggtgccgtatcaggccgattgcgtgatccttgcaggcaatgcggttatgccgactatcgatgcggcatgtaagattgcccgcgatcagcaaattcctttactgattagtggtggtatcggtcacagcacaacttttttgtatagcgccatcgcacagcatccgcactacaacactatccgcaccactggcagagcagaagcgaccatcctggcggatatcgctcatcagttctggcacattccgcatgaaaaaatctggattgaagaccagagtacaaactgcggtgaaaacgcacgctttagcatcgcgctattgaatcaggccgtagaacgagttcatacggctatcgttgttcaggaccccaccatgcagcggcgcacgatggcgacgttccgccgtatgactggggacaatcccgatgcaccacgctggttaagttatcccggattcgttcctcagttaggaaataacgcagacagtgtaatctttattaatcagttacaaggattatggccagttgagcgttatctcagtctactcactggcgagctgccgcgtttacgcgatgatagcgatggctacggtccccgcgggcgagattttatcgttcacgttgattttccggcagaagtcatccatgcatggcaaacgctgaaacatgatgcggtgctcatcgaggcgatggaaagtcgcagcttacgttaaaaattgcccgtttgtgaaccacttgtttgcaaacgggcatgactcctgacttttatttctgccttttattccttttacacttgtttttatgaagcccttcacagaattgtcctttcacgattccgtctctctgatgattgatgttaattaacaatgtattcaccgaaaacaaacatataaatcacaggagtcgcccatgagtgtacccgttcaacatcctatgtatatcgatggacagtttgttacctggcgtggagacgcatggattgatgtggtaaaccctgctacagaggctgtcatttcccgcatacccgatggtcaggccgaggatgcccgtaaggcaatcgatgcagcagaacgtgcacaaccagaatgggaagcgttgcctgctattgaacgcgccagttggttgcgcaaaatctccgccgggatccgcgaacgcgccagtgaaatcagtgcgctgattgttgaagaagggggcaagatccagcagctggctgaagtcgaagtggcttttactgccgactatatcgattacatggcggagtgggcacggcgttacgagggcgagattattcaaagcgatcgtccaggagaaaatattcttttgtttaaacgtgcgcttggtgtgactaccggcattctgccgtggaacttcccgttcttcctcattgcccgcaaaatggctcccgctcttttgaccggtaataccatcgtcattaaacctagtgaatttacgccaaacaatgcgattgcattcgccaaaatcgtcgatgaaataggccttccgcgcggcgtgtttaaccttgtactggggcgtggtgaaaccgttgggcaagaactggcgggtaacccaaaggtcgcaatggtcagtatgacaggcagcgtctctgcaggtgagaagatcatggcgactgcggcgaaaaacatcaccaaagtgtgtctggaattggggggtaaagcaccagctatcgtaatggacgatgccgatcttgaactggcagtcaaagccatcgttgatagtcgcgtcattaatagtgggcaagtgtgtaactgtgcagaacgtgtttatgtacagaaaggcatttatgatcagttcgtcaatcggctgggtgaagcgatgcaggcggttcaatttggtaaccccgctgaacgcaacgacattgcgatggggccgttgattaacgccgcggcgctggaaagggtcgagcaaaaagtggcgcgcgcagtagaagaaggggcgagagtggcgttcggtggcaaagcggtagaggggaaaggatattattatccgccgacattgctgctggatgttcgccaggaaatgagcattatgcatgaggaaacctttggcccggtgctgccagttgtcgcatttgacacgctggaagatgctatcagtatggctaatgacagtgattacggcctgaccagtagtatctatacccaaaatctgaacgtcgcgatgaaagccattaaagggctgaagtttggtgaaacttacatcaaccgtgaaaacttcgaagctatgcaaggcttccacgccggatggcgtaaatccggtattggcggcgcagatggtaaacatggcttgcatgaatatctgcagacccaggtggtttatttacagtcttaatgagtgaaagaggcggaggttttttcctccgcctgtgcgcgtcagagtttagcgaatttttcgagggtgcgaataagctgtgtgacgaagccatattcgttatcgtaccaggcgaccgttttcaccagttgtaaatcgcccacggcggtaatttccgtttgcgtggcatcaaacaccgaaccgaaatggctgccaatgatatcggaagagactatttcttcatcggtataaccaaatgactcgttattggtggttgcttgtttaagtgcgttattcacctcttcggcagtcacttttttccgagaatcgataccagttcagtgaccgaacctgttttcaccggcacgcgttgcgcatgacctttcagtttgccgctcagttccgggatcaccagaccaatggcttttgccgcccccgtagtgtggggaatgatattttctgccgctgcgcgtgaagcacgtaaatctttaccacgcgggccatccaccagtgactgggtgccagtataggcatgaatggtcgtcatcgtgccgacttctatcccgaaactgtcatgcaaggctttggccatcggcgcaagacagttagtggtgcatgacgccacggaaacaatggtgtcgttgccatccagagtgtcgtcattgacgttataaacgatagttttcatttcaccggcaggggcggaaatcaacaccttcttcgcaccagcatcaagatgcgcctgcgatttctcggcggaggtataaaagccagtacattcgacaatgatttctgcacctttcgctttccacggaatatttttagcctctttttcggcgtaaaccgcgatacttttcccatcaacgataagtgaatcttccgtaaaatcaacgctccaggggaatggtccgtagtttgaatcatgtttcagcaggtaggcgagaatttatggggaagtgagatcattaatagcgacaacgtctatgttgcttttgacttcaagtaatcgacccaacaccagtcgaccgatacgaccaaaaccgttaataccaactttactcatggttttctcctgtcaggaacgttcggatgaaaattgatcctttccaagcttagaccaggatggcgggatgggcaatctccattctcacagtgaaacgtaacgtactgaaaacgggtgaacaatatttaatgaaattttgagaaaagcccgttatgttaacggaaaattatgttaaagcaggaaatgttatggaaaataaatatagtaggttacaaatcagcattcactggctggtctttttactggttatcgcagcgtattgcgcaatggagtttcgtggtttcttcccacgtagcgatcggccactcatcaacatgattcatgtttcctgtggcatcagtattctcgtgctgatggtcgttcgtcttttgttaaggctgaaatacccaaccccgccgattatacctaagccaaaaccgatgatgacgggactggcgcatttgggacatttggtgatttatctcctgtttattgcgctgccagtgattggtttggtgatgatgtataaccggggcaacccgtggtttgcgtttggtttgacgatgccttacgctagtgaggccaatttcgaacgggtagatagcttaaagagctggcatgaaacgctggcgaatctgggatattttgtcatcgggttgcacgctgcggctgcactggcacaccactatttctggaaggacaacacacttctacgcatgatgccgcgtaaacgttcctgaaggatatttaaagaaaacgcctgtactaaaaccgacccgtggtacaggcgaagaatacgggtctacatcggaagcgcctattatatttatttgtatgataaataaaaccataatccttgcccatacgtccatctggcttatttttaatcaattcacccgatctttgatctcatcaacggtatcaaaataaaccagcgtataacgttcaaatcgaacataagattcgataaaccatggaggttatatgaaaaaactggcacttattttgtttatgggaacgcttgtttccttttatgccgatgccgggcgcaaaccctgttctggtagcaaaggggggatcagtcactgtacggcaggcggcaaatttgtctgtaatgatggttctattagtgcaagcaaaaaaacatgcactaactgaagtgtaaaaggggtgccatgagaaaatgaatctgctagtcaaatgcgcggggaaaatccccgcgcttgcccttacctggacgtgcaggccatgagcgcagcaacctccttatcaccgtcccggaaccgcagttcgtagagcgtttgtcgggtcaggagtgtgaatgtcagaatcgtaatgcagataatgagcagacacaccaccagagggttgtgcttcatagcctttctccttgccggatggcgggtaagaggctaagatctgaattgctaggttcattcgttggcctcggttgatagaaatatcggtcggggccttcgtctttctgattcccggttagcctgaaaacagaaagtctcaggcacccgcaggcatcctatgaggtttccttagggacgaaaataatcacttcacgaaattgcgtgctgttttccagaatttttcgtcattcgggttagccagtttagccattcgttactctcttcattccaatagcattaattttctatgcaataattgttgtaaaaatgtgacgcaaagaggtttttggtcataagtaattaccgtcaagtgccgatgactttctatcaggagtaaacctggacgagagacaacggtaatgaatacaactcccagtcagcgattaggttttttgcatcacatcaggttggttccgttatttgcctgcattctaggcggtatcttagttctattcgcattaagtagtgccctggctggctatttcctctggcaggccgatcgcgatcagcgtgatgttactgcggagattgagattcggaccgggttagcgaacagtagtgattttttgcgtagtgcccggatcaatatgattcaggccggggctgcgagtcgtattgcggaaatggaagcaatgaagcgaaatattgcgcaagccgaaagcgagattaaacagagccagcaaggttatcgtgcttatcagaatcgaccggtgaaaacacctgctgatgaagccctcgacactgaattaaatcaacgctttcaggcttatatcacgggtatgcaacctatgttgaaatatgccaaaaatggcatgtttgaagcgattatcaatcatgaaagtgagcagatccgaccgctggataatgcttataccgatattttgaacaaagccgttaagatacgtagcaccagagccaaccaactggcggaactggcccatcagcgcacccgcctgggtgggatgttcatgattggcgcgtttgtgcttgccctggtcatgacgctgataacatttatggtgctacgtcggatcgtcattcgtccactgcaacatgccgcacaacggattgaaaaaatcgccagtggcgatctgacgatgaatgatgaaccggcgggtcgtaatgaaatcggtcgcttaagtcgtcatttacagcaaatgcagcatagtctggggatgacagtagggactgttcgacagggcgcggaagagatttatcgtggcaccagcgaaattagtgctggcaatgcggacctgagttctcgcaccgaagaacaagcggcggctatcgaacaaactgccgccagcatggagcaactcactgcgacggtgaaacagaatgcggataacgcgcatcatgccagcaaactggcgcaagaggcttctattaaagccagcgatggcgggcagacggtttccggtgtagtaaaaacgatgggcgctatctccacgagtagcaagaaaatttctgagatcaccgccgtcatcaacagtattgctttccagacgaatattctggcactgaatgctgccgttgaagccgcgcgagcgggtgagcaagggcgtggatttgccgttgtcgccagcgaagtacggacactcgcaagtcgcagcgctcaggcggcgaaagagattgaaggcttgatcagtgaaagtgtcaggttaattgacctggggagcgatgaggtggcaacggccgggaaaaccatgagcactattgttgatgccgtcgcgagtgtcacacatatcatgcaggaaatcgccgccgccagcgatgaacaaagtagaggcataacgcaggttagccaggcgatttctgaaatggataaggtgacgcaacagaatgcttctctggtagaagaggccagtgcggcggcggtgtcccttgaagaacaggcggcacgattaactgaggcggtggatgtattccgtctgcacaaacattctgtgagcgcagaacctcgcggagcgggtgaaccagttagtttcgctacggtgtgaaaatgttcaaggagggatcgacagatcccttcacctttcagaacggcatactttttcgaatagcgttaatcatcaactggcaaccagaagagaacgtcgcatctacgcgggtcagtattccaatcggttcgcctgcaccatgtcccggaacaggcagggccaccagcgtggcatgacgcaggtcgtcttttacagcgccagaagggacaaaccacacgtaatcgtattcaaccgtaagttgacgagataggctagcagacagcgtttcgatacaaccgctaggaattttacagccctggctctgcactaatgcatcactatgctggcgtggcgcagtgccttctggacttacaacgaccggccattccagcacccggcttagcgttacgttctcctgaagtagcgggtgattagggcggacaaccagcttcaagctttcaagaaacagcagttcgtaattaagcccggtcatcagttcaggatcactcatccgaccaatgccgatatcgatttccccggtttttaaacccgccagaatcatagggttactcattgtcgcaacttgcaaggtcgtctctttttgttgctgatgaaactgacctataacgctaggtaatatccccagtgccgcagtaggtagtgcaccaaccctgacgacatcattattaagaccttctttacgatgaaggctccgtccggcagtgttgatggcgtcaagaactctgactgcatgcgttaaaaattgttcgccgggtaaggtaagttgcgccccctgacgaccacgctcaaacaagcgagcgccagtcagctgctccagttcattcaatgtcttagagagcgcaggttgactcaaattaagggtttcagccgcgcgccccaaagttccttgttgtgcgacagctacgaatgtatgaaggtggcgcaaacggatgcgctgactaaacagactatttttttccataagcgatgttaaaaacgaagcggtgtcgctgacaagtgaagttgtttgattatgataacttgattgcaaaatattattaacaattaaagcaattatgttacagcaaaatggataatattgatgttttcgcggcgagatcacagtttgtaaattcttcccgcaagagtgaatgcggttacctacactccagattactgaccactggaggcagacactatggcgaacagcatcacggcggatgagattcgggaacagtttagccaggcaatgagtgccatgtaccagcaagaagttccgcaatatggcacgctgctggaactggtagctgatgtgaatctggctgtgctggaaaacaatcctcaactgcacgaaaaaatggtaaatgcagacgagctggcgcgactgaatgttgaacgtcatggggcgattcgcgttgggactgcacaagagcttgctactcttcggcggatgtttgccattatggggatgtacccggtgagctattacgatctcagccaggcaggggtgccggtacatagcacagcatttcggcccattgatgatgcttctctggcgcgtaatcccttccgcgtttttacctccttactccgccttgagcttatcgagaacgaaattttgcgccagaaagcggcggagattctgcgtcagcgcgatatcttcaccccacgttgtcgacaactgttagaggaatatgagcagcagggcggctttaacgaaacacaggcacaggagtttgtgcaggaagccctggaaacgtttcgctggcaccagagtgcaacggtagatgaagaaacctatcgcgcattgcacaacgaacatcggttgattgctgatgtggtctgttttcctggatgccatatcaaccacctgacgccacgtacgctggatattgaccgggtgcagagcatgatgcctgaatgcggaattgaacccaaaattctcatcgaggggccgccgcgccgcgaggtaccgattttactacgccagaccagctttaaagcactggaagagacggtgttgtttgcggggcagaaacagggcacgcataccgcgcgctttggtgaaattgagcagcgtggcgtggcattaacgccgaaagggcgacaactgtatgatgatcttctgcgtaacgctggaaccgggcaggataatctcactcaccaaatgcatttacaggaaaccttccgcacttttcctgacagtgagtttttaatgcgtcagcaagggttggcatggttccggtaccgtctgacgcctagcggtgaggcgcatcgtcaggcgattcatcctggagacgatccacagcccttaattgaacgtggttgggtagtggcgcaacccatcacctatgaagatttcttgcccgttagcgcggcggggatcttccagagtaatctgggtaatgaaacgcagacacgcagtcacggtaatgccagtcgcgaagcatttgagcaggcgttgggttgtccggttttggatgagttccagctttaccaggaagcggaagaacgcagtaaacgtcgctgtggtttgctttaaaatctgaccatccgcctttgcaaaaatttgcctgattttacaaacgaatcaggctcatcccatcgacataaaaaaaatgccgatttatgcatattctctcagttcaacaattggattattaataaatattgtctagagtgagcggtcataaataagcactttcttgccgctgaaaacgaccagcgcgggaccattcacaacaccagaaggactcactttcaggtatggatcgtagacgatttattaaaggttcaatggctatggccgccgtgtgcggtaccagcggcattgcttctcttttttctcaggcggcattcgcggcagattctgatattgccgacgggcaaacccagcgttttgacttctccattctacagagtatggcgcacgacttagcgcaaacagcgtggcgtggtgcgcctcgtccgttacctgacacgctggcgacaatgacgccgcaggcttataacagtattcaatacgacgccgaaaaaagcctctggcataacgttgagaaccgtcaactggacgctcagttcttccatatgggaatgggattccgtcgccgcgttcgtatgttttctgtagatccagcaacacatctggcgcgtgaaattcactttcgcccggagttgttcaaatacaacgatgcaggtgttgatacaaaacaattagaagggcaaagcgatctcggctttgccggttttcgcgtgtttaaagcccccgaactggcgcgccgtgatgtagtaagttttctcggcgcgagttatttccgcgccgttgatgatacatatcaatacggtttgagcgcccgcggcctggcgatcgacacttacaccgacagtaaagaagagttccccgactttaccgccttctggtttgatacggtaaaaccgggggcaactacctttaccgtttatgcgttgctcgatagcgccagcattactggtgcctataagttcactatccattgtgagaaaagtcaggtgattatggatgtggaaaatcacctgtatgcgcgcaaagacattaaacagctgggcattgcgccgatgaccagtatgttcagctgcggtactaatgaacgtcggatgtgcgatacaattcatccgcaaattcatgactctgatcgtctgtccatgtggcggggcaacggcgagtggatttgccgtccgctgaataatccgcaaaaattgcagttcaatgcttacaccgacaacaacccgaaagggtttggtttattgcaactggatcgtgacttctcccattatcaggacattatgggctggtataacaaacgcccaagtctgtgggtggaaccgcgtaacaagtggggtaagggcaccatcggcctgatggaaatcccaacaacgggcgaaacgctggataacattgtctgcttctggcagccagaaaaagctgtaaaagcaggtgatgagtttgcattccagtatcgtctgtactggagtgcgcaaccgcctgttcattgcccattagcgcgcgttatggcgacgcgtaccggcatgggcggtttcagcgaaggttgggcgccaggtgaacactatcccgaaaaatgggcgcgtcgttttgccgtcgatttcgttggtggtgatctgaaagctgccgcgccaaaaggcattgagccggtgattacgctttccagtggggaagcgaagcaaatcgaaattctctatattgaacccatcgatggttatcgtattcagtttgactggtatccgactagcgactccactgatccggtcgatatgcggatgtatctacgttgtcagggggacgctatcagtgaaacatggctgtatcagtatttcccgccagcgccggataaacgtcagtatgttgacgaccgcgtgatgagttaatcgttttttcttcggcaccttcttcgggaggtgccgtctggttaaacacgatcccgctcgcatttttccctaagttaaatgagtaatctgatggtgtgtatttcagatacaccttgtcagccactaacagggagtgcgtatgtttccagaataccgagatttaatatcccgtctgaaaaacgaaaatcctcgctttatgtccttgttcgataaacacaataaacttgatcatgaaattgccagaaaggaaggttccgacggtcgagggtacaatgcggaagtggtccgcatgaaaaaacaaaagctacagttaaaagatgagatgctcaaaatcctgcagcaggagagcgtcaaagaggtgtaaactttcctaagccgccagccaggcggcttttttaacaactgcatggattgactggagataagatgactgaaacgataaaagtaagcgaaagtcttgaattacatgctgttgcagaaaatcacgtcaaacctctttatcagttaatctgtaaaaataaaacctggttacagcagagcctaaactggccgcagtttgttcaaagtgaagaggacacgcgaaaaacggtgcagggtaatgtgatgttgcatcaacgcggctatgccaaaatgttcatgattttcaaagaagatgaacttatcggcgttatcagctttaatcgtattgaaccactgaataaaaccgctgaaatgggctactggctggacgaatctcatcaggggcaggggatcatttctcaggcgctgcaggcattgattcatcattacgcccagtctggtgaacttagacgcttcgtgatcaaatgtcgggtggacaatccgcaaagcaaccaggtcgctttgcgcaatggttttatccttgaaggttgcctgaaacaggctgagttcctgaatgatgcctatgatgatgtgaacttatacgcgcgtattatcgatagtcaataatcacaataaccctgccagcggcgttcgcgtaatgcgctcctcgccgttaatgacttttggaccacggacatgaaccgtgtcgccatcaaaggcttcaacgacggcgtggtcggttaactccacatggttttcaattatcaccgcacctgtaatacggctctcaccttgtatgacaacgtgctcgtcgagcagaatcggtccgccacgtaccacggcatttccgccaaccaagacatgatgttttaacacacaattaccttccacaatggcatattccgccacctggctactgtaatgaatcgtcggaatggcatcttcttctatgccagctttcacctgcgcgtgaccgtagactttagcgcaatcgcatagccagacattgttctcttcattaccttcaatactggcaaaatcaaaaacttcggcgcgatgttcaataaaagcataccggacgacggcatcgccataaatttgtgcctggtggacaatacggctggcgctaacccttgcgcgatcataaatttggagcaggagttgatggtcgggcgttaagccttgtgcggcgacgatcatagaatgttgatcaattaaggcgtgaccaaatattctacattgcccgtaaactaaactgtcatgaatggtgacgctgtcacttatatatgcaccctggctgatttcactattatcgatccagacgttatccgttgcgtaaacctctccccacagcacgctggtgccggtgatacgcgtattaccggaaatcaccgctccgccgaacgcaatagcattctggtcgtaaatccagcaatttccttcttgtgctaacaccgtttcgcgatcgatccagccgccagcggttcctgctatcacatcgttaaaatcgctaatggcgataatctgccgtaataacacattttttttagtgccatcttcctgataactaaaggctcgctgttcttcacttagacgatatttgcgcatagcgttttcccacaggtgacttactataaccgtagcaaattctgcggctctggctatgctcgagaaaattccataaaatgcatttcaaatatactttataaattaaacaaaatgagtaagaagatgcagagcgataaagtgctcaatttgccggcaggctactttggtattgtgttggggacgatagggatgggatttgcctggcgctatgccagccaggtttggcaggtcagccactggttaggggatgggctggtgattctggcgatgatcatctggggattattgactagcgcatttattgcccgactcatacgctttccgcatagcgtgctggcggaagttcgccatccagtgctgagcagttttgtgagtttgtttccggcaacgacgatgctggtggcgattggttttgttccgtggtttcgcccactggcggtgtgcctgttcagttttggtgtcgtggttcagttggcttatgccgcctggcaaactgcgggattatggcgcggatctcaccctgaagaagctaccacgcctggactgtatctgccgacagttgccaacaactttatcagcgcaatggcctgtggtgcgttgggctacaccgacgccggtctggtgtttttaggcgcaggcgttttcagttggctaagccttgaaccggtgatcttgcagcgtctgcgcagtagcggagaattacccacggcactgcggacaagtctcggcattcagctcgctcctgcgctggtggcttgtagtgcctggctgagcgtcaacggcggcgagggtgacacgctggcgaaaatgcttttcggttatggactgctgcaactgctgtttatgctacgtctgatgccatggtatctctcccagccatttaatgctagtttctggagtttcagcttcggcgtatctgcactggcaaccaccggtttgcatctggggagtggcagcgataatggatttttccatacgctggcggtgccgctgtttatctttaccaattttattattgcaatactgctcatccgtacttttgcgcttctgatgcagggaaaattgttagtcagaaccgagcgcgccgttttaatgaaagcagaggacaaagaatgatcattcgtgacgaaaactattttactgataaatatgaattaacccgcacacactctgaagtactggaagcggtgaaagtggttaaaccgggtaaaacgctggatctgggctgtggcaatggtcgtaacagtctttacctggcagccaatggttatgatgttgacgcatgggataaaaatgccatgagtatcgccaacgtcgagcgcattaaatccattgaaaatctggataatttacacacccgagtcgttgatctgaataacctcacatttgatagacagtacgattttattcttagcactgtggtgctgatgttccttgaggctaaaaccatccccgggttgattgccaatatgcaacgttgcactaaacctggtggttacaacctgattgtggcggcgatggataccgctgattatccatgtaccgtcggcttcccgtttgccttcaaagagggagaattacgtcgatattacgaaggctgggagagggtgaaatacaatgaagacgtcggcgagctgcaccgcaccgacgccaacggtaatcgtattaaactgcgtttcgccacgatgctggcacgtaaaaaatgacccggtaagcacaaaacgcgtgaaaattccccacgctgagatgatttactgttcttcttttcggtaagcatattttttatcgaagggatgtgaaattaatcacagtagtcgaagtttttagcagcttaacttactgaaatttaagtactgatgattgacttagcccctttttcggcattgactatgtcgtctgaaaaggggctgaaaaatttattttcaccaacactttttttgccacaacacgaagcggcgctttttgctataacttagaaagtaatataatcatctcaggaaactattcatgcgtaccacaagttttgcgaaagttgcagctttatgcggcttattggctctgtctggttgtgcatctaaaatcacccagccagataaatattctggttttttaaacaattactctgatttaaaagaaacaaccagcgctacaggtaaacctgttttacgttgggtagacccgagttttgatcaaagcaaatatgacagcatcgtctggaacccaatcacttattatccggtaccgaaaccgagcacccaggtagggcagaaagttctggataaaattttgaactataccaacaccgaaatgaaagaagcgatagcgcagcgtaaaccactggttaccaccgctgggccgcgtagtctgattttccgtggggccattaccggtgtagataccagcaaagaagggctgcaattctatgaagtggttcctgttgcattagtggttgcggggacgcaaatggctacaggccaccgtaccatggatactcgcctctattttgaaggtgagctgattgatgcagcgactaataaaccggttatcaaagtcgttcgtcagggcgaaggtaaagacctgaataacgaaagtacgccaatggctttcgaaaatattaaacaagttattgatgacatggcgaccgatgccaccatgtttgacgttaacaaaaagtaattccagacgcgccatcgttagatggcgctttttatccggtgcgccgtaaaaccccatccttcagggcggggatataaggcgcggttttccacctgaccaggtgtttgctgttgttcaatgtattggcggatgacggatattggcgcacctccgcagctactggcaaaatagccaggactccacaaaacgcctttgtagtaatacctgaatgcaatatctggtcgatctcgtcgcagtcacctacccgatacgcctttgaggctgtttaccagactggatatcgccagtttgggaggatagttaattaacaaatggacgtgatctggttcgccatccatttcaaccagttcagcttcaaaatcagcacatacatttgaaaagtaagtgcgtagtttttctgtcgcgtcatggtcaaaaatctggcgtcggtatctggtgacaaagagcaggtgaacatgcatcaggaaaacacaatgccttccacgccggatatcggtttcttttttcacagaccaaagtatcatttgacctgtgaaacgattacaggcatttaaattccagttaagacccggtggtcaacaggagtgtgaaatgaggcgcttcgcaggcgcatgtcgtttcgttttcaatcgtgctctggcacgtcagaatgagaatcatgaggccggtaataaatacatcccttacgggaaaatggcttcctggctggttgagtggaaaaatgccactgaaacgcaatggcttaaagattctcccagtcagccattgcaacagagtctgaaagaccttgagcgggcttacaaaaacttcttccggaagcgggctgcttttccccgattcaaaaagcggggacagaatgatgcattccgctacccgcagggcgttaagctcgatcaggaaaacagccgtatttttctgccgaaactgggctggatgcgctaccggaacagccgtcaggtcacgggtgttgtgaaaaatgtcactgtcagccagtcctgcggtaagtggtacatcagtattcagacagaaagtgaagtaagtactccggttcaccctagtgcaagtatggtcgggctggatgctggcgtggctaaactcgccacgctgagtgatggcacagtctttgagcctgtaaacagttttcagaaaaaccagaagaagctggcgagacttcagcgacagttaagccgcaaggtcaaattcagcaacaactggcaaaagcagaaacgcaaaatacagcgactgcattcctgtatcgcaaatatccgcagggactaccttcacaaagtcacaacggccgtcagcaaaaaccacgcaatgatagtcattgaggatttgaaggtcagcaacatgagtaagagtgcagcgggtacggtcagccagccggggcgcaatgtccgggcaaaaagtggtttaaaccgtagcatactggatcagggctggtatgaaatgcgccgccagcttgcgtataagcagctctggcgtggcggtcaggtgcttgctgttccgccagcgtatacaagccagcgttgcgcgtactgtggtcatacagcgaaagagaaccgcctgagtcaaagtaaattcagatgccaggtatgtggatatacagcgaacgccgatgtaaatggcgctcgcaacattttagcggcggggcacgccgttcttgcctgtggagagatggtgcagagtggccgcccgttgaagcaggaacccaccgaaatgattcaggcgacagcctgaacgtagcagggatccacgtccttcagggcgtggaggatgtcaatatcggtttctgtcagcgattaaattcaacaccacgtaacaaacgcctccggcaattaatccccaaaacgcagaaccaatcccgaccagcgtcaatccacttgccgttaccagaaatgccaccaccgccgcgtctcgctcacgctcattatgcagcgcctgatacaaactgccgccgatggtacttaacagcgccagacctgccagcatctggatccaacttacgggcagggcagccatcatcccggtaatggcactaccaaacagacctgcgagcaaatagaaaatgcctgcaacggcagcggccagccaacgttgatctttatccggatgcgcttccgggctttggcaaatagccgcggtgattgccgcaataccgacggaataaacgccgaaaggggaaaaaaccagtgccagcaatccagtaaatacaattaatgggctaacaggagcgctatatccagctgctttcattgctgcgatacccggtgcgttttggcttgccatcgtcaccagaaaaagggggagtgcaacgctcaggctgtgagcaaagctaaaatcaggggtaatataagtggggagaacgggtttaaagacaacatcagttgtgacaacgtcaccttgcgcgatgacgatcacgatcccaataatcatcgcggcaattaccgcatagcgcggcgcaacggccttggttgccagccataccagcaacatacttccacacaacgtaaattgaccgtccagactggcaaacgcctgtaaaccaaagcgtaataaaatcccggcaagcattgccgccgcaaggctgtgcggaataatgcgcatcagacgagcaaagagtcccgttatgccgcagaggactattagcgcgttggtgacaataaaaacgccgatggcttcgttaagtgttagtccctgcaatccggtgaccaacaaagccgcgccaggcgtactccatgcggtgagaacaggtacgcgataccataatgtcagagtcagcgtactgacgcccattgccagccccagcgccgtcatccagccagagatttgtgcagtggtggctccggcgacaatcgctgcttgccagattattgccgcactactggcgtagccaattaataccgccagaaaccccgccagtagcgtgggtggaggaatagaaaacagacgcatagtcacctcgtgcgttatagcgtacaggcaccgtagcatttgtccgttataacgcacaagtgataaacttccgttttgccggaggagtcgcatggaaaatctcgctcgctttttatccaccacacttaaacaactacgccagcagcgcggctggagtcttagccgactggcagaagcgacgggcgtttctaaagcaatgttagggcagattgagcgtaatgagtccagtccgacggtcgcgacattatggaaaattgccaccgggttgaacgtaccatttagtacatttatttctccgccgcagtccgctacgcctagtgtttatgatccacaacagcaggcgatggtgatcactagcctgtttccttatgatccacaactctgctttgaacacttcagcattcagatggcatctggtgcaataagcgaaagcacgccccatgagaagggggtaatcgaacatgtcgtcgtcattgatggacaacttgatctgtgcgttgatggggaatggcagacccttaattgtggggaaggcgttcgatttgctgcagacgtcacgcatatctatcgtaatggtggggagcaaaccgtacattttcattccctcatccattacccgcgcagttaagcgggaaaactatttcgcaacgtcgcgcttgtggctaaaatagccgccatttttcagctactggataagaatgtgaccgtatcttctcatcgacttgaactgttaagcccggcacgcgatgccgccattgcccgcgaagctattttgcacggtgccgatgctgtttatatcggcggccctggttttggtgcccgtcataatgccagtaatagcttgaaagatattgccgagctggtgccgtttgcccatcgttatggtgcaaaaattttcgtcacgcttaacaccattttgcatgatgatgagctggaacccgcgcaacggctgattactgacctctaccagaccggtgtcgatgcgctgattgttcaggatatggggattctggaacttgatattccgccgattgaactgcacgccagtacgcagtgcgacattcgtacagttgaaaaagcgaagttcctctctgatgttggcttcacgcagattgtgctggcgcgagagctgaatcttgatcagatccgcgcgattcaccaggctacggacgcgaccattgaattctttattcatggggcactgtgcgtggcctatagcggtcagtgctacatttctcatgcgcaaacagggcgtagcgccaaccgtggcgattgcagccaggcgtgccgtttgccatacacattgaaagacgatcaggggcgggtggtttcctatgaaaaacatctgctgagcatgaaagataacgatcagactgccaacctcggcgcgctgattgatgctggtgtacgctccttcaagattgaagggcgttacaaagatatgagctacgtgaagaatatcaccgcccattatcgccagatgcttgatgccattattgaagaacgtggcgatctggcgcgcgctagtagtggtcgtactgaacatttctttgttccaagcacggaaaagactttccaccgtggtagcacagattattttgtgaatgcccgtaaaggcgatattggcgcgttcgatagcccgaaatttatcggcctgccggtaggcgaagtagtgaaagtggcgaaagatcatctcgatgttgccgttaccgagccactggcaaatggcgatggcctgaacgtgttgattaaacgtgaagtcgtcggttttcgtgccaatacggtcgagaaaaccggagaaaatcagtaccgcgtctggcccaatgaaatgccagcagatttgcacaaaattcgtccacatcacccactaaaccgtaatcttgatcataactggcagcaggcactgacaaaaacctccagcgaacgtcgggtggcggtagacattgaactgggcggctggcaggaacaactgattctgaccctcaccagtgaagagggtgtcagcatcacgcatacgctggacgggcagttcgacgaagccaataacgccgaaaaagcaatgaacaatctgaaggatggtctggcaaaactggggcaaaccctctattacgcccgcgatgtgcaaattaatttgccgggggcgctgtttgtaccaaacagtctgttaaaccagttccgccgtgaagctgctgacatgctggatgctgcgcgtcttgccagttaccagcgcggcagccgtaaaccggttgctgatcctgcgccggtttatccgcaaacgcatctgagtttcctcgcgaacgtatacaaccagaaagcgcgtgaattttatcatcgctatggtgtgcagctgattgacgcggcgtatgaagcacatgaagagaagggcgaagtcccggtgatgatcaccaagcattgtctgcgctttgcctttaatctgtgcccgaaacaggcgaaaggcaatatcaaaagctggaaggcgacgccaatgcaactggttaacggcgatgaagtattaacgctaaagtttgattgccgcccatgcgagatgcacgtcattggcaaaatcaaaaatcacatactgaaaatgccgttaccgggaagcgtagtggcatccgtaagtccggatgagctgctgaaaacattgccgaagcgaaaagggtaaaacgccagttttctggttactcacaacttattgaatctgcatgatattgcctgccgggtaaggcgttacgccgcatccggcatcaaatgactcaacgttgtcccgcttctggtttgcggcttttttgccagtaaaaatgctcgcgcaaaccttccgcgctctcttccgccacagcacgcaattcatcgctgtccgcttcatgacgcagctgatgatccacattctttacccacacaaattcatgtcctttgtgccctgccatgagttgtccactaaacagagcacacgttaataagacaacgcttaacgccttcgtaaacatcctgccacctttttcttaccttttgccgctatgatgccgatcgtttcttgaggttattattcagttttgcaaattagcgcaaagaaattctggaatcttccttcctgattttgcattgcattctgccgttgcggcgatttagtgctattttcgagcaaattacacacggaggtaaacactaatgtttactttgttgatatactcagcggcagggaggcgatgtgaaacaaagcgagttcagacgttggctcgaatctcagggcgtcgatgtagcgaatggcagcaaccatttgaaactcaggtttcatgggaggcgcagtgtcatgccgcgtcacccctgcgatgagattaaagaaccattgcgtaaagcaatcctgaaacaactcggtttgagttaatcgccaattaaaaaggttaatgacatgcgagagacagtcgaaattatgcgttatcccgtcactcttacacccgcgccggaaggcggttatatggtttcttttgtggatatccctgaagcgttgacccagggcgaaactgtcgctgaagcgatggaagcggcaaaagatgctttactgaccgcatttgatttttattttgaagataacgagcttatccctttacctagcccattaaatagtcacgatcactttattgaagtacctttgagcgtcgcctctaaggtattgctgttaaatgcttttttacagagtgaaatcactcagcaagagttagccaggcgaattggcaaacctaaacaggagattactcgcctatttaacttgcatcatgcgacaaaaatcgacgccgtccagctcgcggcaaaggcgcttggcaaagagttaagcctggtgatggtttaattacagttaacgaaaagttgtcatttttaacaactgatatagactgccgaatcatctgcacataattacgattcgataatgaaaaaataccagcagcttgcagaacaattacgcgagcagattgcgagcggtatctggcaacccggcgatcgtttgcctagcttgcgtgaccaggtggcgcttagtggcatgagctttatgactgtcagccatgcctatcagttgctcgaaagtcagggatatattatcgcacgaccgcagagcggttattacgttgcgccacaggcaataaaaatgccgaaagcgccagtcattccagtcactcgagatgaagcagtcgatatcaacacttatatttttgatatgttgcaggccagtcgcgatccgagcgtcgttccgtttgccagcgcctttcccgacccgcgacttttccccctccaacaactaaaccgcagcctggcgcaggtaagcaaaaccgccacagcgatgagcgtgattgaaaacttaccgccaggaaacgcagaactgcgtcaggctattgctcgtcgctatgccttacagggcatcaccatttctcctgatgaaattgtcattactgccggggcgttagaggcattaaacctcagtttgcaagcggtaactgaaccgggcgattgggtgatagtagagaatccttgtttctacggtgcgttgcaggcgctggagcggctacggctgaaggcgttaagcgtggcgacggatgttaaagaagggatagatcttcaggcgctggaactggcgttgcaggagtatccggtgaaagcgtgctggctgatgactaatagccagaatccactcggatttaccttaacgccgcaaaaaaaagcacaactggtggcgttgctcaatcagtacaacgtaacgctgattgaagatgacgtttacagcgaactttattttggacgggaaaaaccgctgcctgcgaaagcgtgggatcgccacgatggcgttttgcattgctctagctttagcaaatgtctggtgcctggttttcgtattggttgggtcgccgccggaaaacatgcacgtaaaattcaacgcttgcagttgatgagtacgctttccaccagcagtccgatgcaacttgcgctggtggattacctttccacgcgccgatacgacgcccatcttcgtcgcctgcgtcgccagcttgcggaacgtaaacaacgtgcctggcaggcactgctgcgttatctgcctgcggaagtgaaaattcatcataatgacagtggttactttctctggttggagctccccgagccgttagatgccggcgaattaagcctggcggcactgacgcatcatatcagtattgcgccgggtaaaatgttttctaccggtgaaaactggagtcgttttttccgttttaataccgcgtggcagtggggagagcgtgaagaacaggcggtaaaacaattaggcaaacttattcaagaacggctgtaatagcgtttaatttaattcctcttagattgggtaatatgaatttcgaatagcagtcatatttcctaactccttgactatactccagaagataaccttacagacggcataatgcgcggtagctcacaacctgaataaattttctcaggggcgaaggtgtgcctgcaagccgccgtctatggttaaacaaggagatatttttacggcacggcggctgaacaattaattacgacaggagtaagaccttatgagcaagacatttgcccgcagcagcctgtgtgcgctcagcatgacaataatgaccgctcacgccgccgaaccgcctaccaatttagataaaccggaagggcgactggatattatcgcctggccgggatacatcgaacgcggacaaactgataaacaatacgactgggtaacgcagttcgaaaaagagacaggctgcgcggtgaatgtgaaaaccgccgcgacttccgatgaaatggtcagtctgatgaccaaagggggttacgatctggttacggcatccggcgatgccagcctgcgtttgattatgggtaaacgcgtgcagccgattaataccgcattgattcccaactggaaaacgctcgatccgcgcgtggttaaaggcgactggtttaatgttggcggcaaagtttacggcacaccttaccaatgggggccgaacctgctgatgtacaacactaaaaccttcccgacgccgccggatagctggcaagtggtttttgttgagcaaaatctgccggacggcaagagcaataaaggccgcgttcaggcttatgatggccctatctatattgcggacgctgcgttgttcgttaaagccactcagccgcagttgggcatcagcgatccgtatcaactcaccgaagaacagtaccaggcggtgctgaaagtgctgcgcgctcaacacagtttgatccatcgctactggcatgacactaccgtgcaaatgagcgatttcaaaaacgagggtgtggttgcttccagtgcctggccctatcaggccaacgccctgaaagccgaaggccagcctgttgctaccgttttcccgaaggagggtgttaccggttgggctgataccaccatgctgcatagcgaagcgaaacatccggtttgcgcctacaaatggatgaactggagtttaacgccaaaagtgcagggcgatgtggcggcctggtttggcagcttaccggtagtgccggaagggtgtaaagccagtccgttattaggcgaaaaaggttgtgaaaccaacggttttaactatttcgacaaaatcgccttctggaaaacgcctatagcagaagggggcaagtttgttccctacagtcgctggacgcaggattacattgccattatgggcggtcgctaacttcgctggggtgctttatgacgtacgcagtggagtttgacaacgtcagccggttgtacggtgacgtgcgcgcagtagatggcgtcagtattgcgataaaagatggtgagttcttctctatgctggggccgtccggctccggcaaaaccacctgcctgcgcctgattgctggcttcgaacagctttccggcggggctatctctatctttggtaaacccgccagcaatctgccaccgtgggagcgggacgtgaatactgtctttcaggactacgcgctatttccgcatatgagcattcttgacaatgtcgcctatgggctgatggtcaaaggcgtgaataaaaagcagcggcacgcaatggcgcaagaggcgctggagaaagtggcgttggggtttgtacatcaacgtaaaccgagtcaactttctggtggtcagcgccagcgggttgctatcgccagagcattggtgaatgaaccgcgcgtattgctgttggatgaaccgctcggcgcactggatctcaaattgcgtgagcagatgcagctggaactgaaaaaactgcaacagtctctcggtatcacttttatcttcgttacccacgatcagggcgaagcgttaagcatgtccgatcgtgtggcggttttcaataatggacgcattgagcaggtcgattccccgcgcgatctctatatgcgcccgcgcacgccgtttgttgccgggttcgttggtacaagcaatgtttttgatggactgatggcagagaaactttgtggcatgacgggaagcttcgccctgcgaccggaacatatccgcctcaacacccctggtgaactgcaggccaatggcacgatccaggcggtgcaatatcagggcgcggcaactcgttttgaactgaaattgaacggcggtgaaaaactgcttgtgagtcaggccaatatgacaggcgaagaactgcctgccacgctcacgcccggacaacaggtgatggtttcctggagccgtgatgtgatggtgccgctggttgaggagaggtgaatggcgatgaatgtattgcaaagtcctagtcgtccaggtctgggtaaggtgtccggtttcttctggcataatccggggctggggctgtttttactgctgcttggcccgctaatgtggtttggcattgtctatttcggcagcctgctgacactgttatggcagggattttatacttttgacgatttcaccatgagcgtaacgccggaactgacgctggcgaatatccgtgcgctgtttaatccggcgaattacgacatcattctccgcacgctgactatggctgtggcagtcactatcgccagcgccattctggcttttccaatggcgtggtatatggcgcgctataccagcgggaaaatgaaagcgtttttttatattgcggtaatgttgccgatgtgggcgagctacattgttaaagcctatgcctggacgttattgctggcaaaagatggcgtggctcagtggtttttacaacatcttgggctggaaccactgctgactgcgttccttacattacctgcggtgggcggaaatacgctgagtacttccgggctggggcgctttctggtgtttctctatatctggttgccgttcatgatcctgcccgttcaggcggcgcttgagcgtttgccgccgagtttgttgcaggcgagcgctgatctcggcgcacgtccacgacaaacctttcgctatgtggtgctgccgctggcaatcccgggtattgccgctggctctatctttaccttcagtctcacactgggcgattttatcgtcccgcagctggttggtcctccaggatattttatcggcaatatggtttattcccagcagggggcgattggcaatatgccgatggcggcggcattcaccctggtgccgattattctcatcgcactgtacctggcgttcgtgaaacgtctgggagcgttcgatgcactctgaacgcgcaccgtttttcctcaaactggcggcctggggcggcgttgttttcctacattttcccatcctgataatcgccgcctatgcgtttaacactgaagatgcggcgtttagttttccaccgcagggcctgacgctgcgctggtttagcgtggcagcacagcgtagtgatattcttgatgccgtgacactgagtcttaaagtggcggcgctggcgacattaattgcgctggtgttagggacgctggcagctgccgcgctgtggcgacgagactttttcggcaaaaacgccattagcctgttactgctgctgcccattgcgctgccgggcattgtcactggtctggcgttattaaccgcctttaaaaccatcaatctggagccgggatttttcaccatcgtggtcggtcatgcgactttttgtgtagttgtggtgtttaacaatgtcatcgcccgttttcgccgcacctcctggagtctggttgaggcgagtatggatcttggggccaatggctggcaaaccttccgctacgtagtgttgccgaatctcagtagcgcgttactggcaggaggaatgctggcgtttgccttgagcttcgatgaaatcatcgttacgacctttacggcaggtcatgaacgaacgttaccgttgtggttgctcaatcagcttgggcgaccgcgtgatgtaccggtaactaacgtggtggcactgctggttatgttggtaacaaccttgccgatcctgggggcctggtggctaacccgcgaaggcgacaatggtcaataaccactgatacaggaatatgctatgcaacataagttactgattaacggagaactggttagcggcgaaggggaaaaacagcctgtctataatccggcaacgggggacgttttactggaaattgccgaggcatccgcagagcaggtcgatgctgctgtgcgcgcggcagatgcagcatttgccgaatgggggcaaaccacgccgaaagtgcgtgcggaatgtctgctgaaactggctgatgttatcgaagaaaatggtcaggtttttgccgaactggagtcccgtaattgtggcaaaccgctgcatagtgcgttcaatgatgaaatcccggcgattgtcgatgtttttcgctttttcgcgggtgcggcgcgctgtctgaatggtctggcggcaggtgaatatcttgaaggtcatactagcatgatccgtcgcgatccgttgggggtcgtggcttctatcgcaccgtggaattatccgctgatgatggccgcgtggaaacttgctccggcgctggcggcagggaactgcgtagtgcttaaaccaagtgaaattaccccgctgaccgcgttgaagttggcagagctggcgaaagatatcttcccggcaggcgtgattaacatactgtttggcagaggcaaaacggtgggtgatccgctgaccggtcatcccaaagtgcggatggtgagcctgacgggctctatcgccaccggcgagcacatcatcagccataccgcgagctccattaagcgtactcatatggaacttggtggcaaagcgccagtgattgtttttgatgatgcggatattgaagcagtggtcgaaggtgtacgtacatttggctattacaatgctggacaggattgtactgcggcttgtcggatctacgcgcaaaaaggcatttacgatacgctggtggaaaaactgggtgctgcggtggcaacgttaaaatctggtgcgccagatgacgagtctacggagcttggacctttaagcagcctggcgcatctcgaacgcgtcggcaaggcagtagaagaggcgaaagcgacagggcacatcaaagtgatcactggcggtgaaaagcgcaagggtaatggctattactatgcgccgacgctgctggctggcgcattacaggacgatgccatcgtgcaaaaagaggtatttggtccagtagtgagtgttacgcccttcgacaacgaagaacaggtggtgaactgggcgaatgacagccagtacggacttgcatctagcgtatggacgaaagatgtgggcagggcgcatcgcgtcagcgcacggctgcaatatggttgtacctgggtcaatacccatttcatgctggtaagtgaaatgccgcacggtgggcagaaactttctggttacggcaaggatatgagtctttatgggctggaggattacaccgtcgtccgccacgtcatggttaaacattaaggataatattgcagatcgtaagagtatgagatgatcttgcgtactgtcagagcactgatttctctgacagtacgtgctgcgtgcaaaatcactacatcaaataaaccagccaaatctcatagagataagagtaaacaaaccaacagcagcaaagaaatttatcagtactacagttctactggaaacattcatttttgccaccttttatcattgcccctatgtgtatagtacgggttaagaaaatccgcaataatactcattctgaagatggataagggcaagttgctgtttgatgattttttctcaaactggtgaaaaaacttgatgcacgtcaaaaaatgacgcatatttgcgcgcgttttattcatctggctggacgcccgtacatgtctctctatcaacacatgcttgttttttatgcggttatggcagcaatcgcatttcttatcacctggtttctttctcacgataagaaacgcatccgtttcttaagcgcctttctggtgggggcaacatggccgatgagtttcccggtggcgctgttgtttagtctgttttaaatcttactcactggcttgacggcaccacgcagacttatatcatttggatgaatcgataaatttcacaagtggctaaggagaaagtatgagccatctggatgaagtcatcgcgcgcgtggatgccgcgattgaagagagcgtcattgcccatatgaacgaattattaatcgccctgagcgatgacgcggagttaagtcgggaagatcgctacacccagcagcaacgtctgcgcacagcgatcgcccatcacggtcgcaagcataaagaagatatggaagcgcgccacgaacagttaaccaaaggcggcaccatcctctgattaaaaactgcgtctggctaccaaccaggcgccaaccacaagtaaaattgcgccacaaattgggccgaacaacgcccgtagtggtacgccatgactgcggaagatatccagcatcagaccgccaatcagctgactggcgaccagtacagcaatagttgtcgccgctcccacattctgatatccgctgatactggcgaagacaaaaaagcttcccagcaagccaggtataagtgtccaccagcgcacgctggacaccagttcgccaaaccccgccatgccttgtttaaaccataaaatagaaacaaagagcacaatccccaccagactgttcagcaacatggcgatgagaatggtagaggaggtctgggtgatgcgcaccatcagcgtgttctggacaaccagaccaattccggcggcaatcaaaaaagcaagggtgaggctctgattcatccaatcgcgtccggttcagtgcgctcgtcgagttgcaactgcataaatgtcagatccagccaacgaccaaatttagtgcctacctgcggcatttgcgcggtgacgacaaatcccaggctctggtggagatgcaggctggcctgattttggctttcgatcccggcgaccatgacatgcttcccgcaatcccgcgcttcatcaatcaatcggcttaacaatttacgccccagacctttgccctgatgatcgggatggacataaacgctatgttccacggtatggcgaaaaccatcgaaactacgccagtcgccaaagctggcatatcccgtcactacgccgttttcctcgctcaccagcactggataacctgctaaagtccgcgcttcaaaccaggcaatgcggttatcagcatccaccgtttggtcattccagatagccgccgtatacaacacggcgtggttataaatttccgcaatggcagcacagtcggctttgcgggcaaaacggatggacatgtctggcctcaataaaataatgatgatgatgttatcaatactatcgaaaacagcccgaagcaacggattcctcgatgaaattattgcgtgttgcagaggggatgtgacggctgcaaacaaaaccaatcccgtgagcctgctactattgatggattcatgccaaaagcacaggagagcattatggggcaacaaaagcagcgtaatcgacgttgggttctggccagccgtccacatggcgcacctgttccggagaatttccgtcttgaagaagatgatgtcgccacaccgggtgaaggacaggtgttactgcgcacagtttatttgtccctggacccgtatatgcgtggacgtatgagcgatgagccatcttatagtccgcctgttgatattggcggcgtgatggtcggcggtacggtgagccgtgtcgtggagagcaatcatcctgattatcagtctggcgactgggtgctgggctacagtggatggcaagactatgacatatccagtggtgatgatctggtgaaacttggcgatcatccgcaaaatccaagctggagcctgggtgtgctagggatgccaggctttaccgcttatatgggcctactggatatcggtcagcctaaagagggcgaaacgttggtggtagctgcggcgacaggaccagtgggggcgacggtggggcaaatcggcaaacttaaaggttgcagagtggtgggggtagccggtggcgcggaaaaatgccgccatgctaccgaggtgttaggcttcgatgtttgtcttgatcaccacgcggatgattttgccgaacaactggcgaaagcgtgcccaaaaggtattgatatctattatgaaaacgtgggcggtaaggtattcgatgcggtgctaccgttacttaatacatctgcgcgcattcccgtctgcggattagtgagcagctataacgctacagagctaccacccggtccggatcgtttacctctgttgatggctacagtgctgaaaaaacgtattcgcttgcaaggttttattatcgctcaggattatggtcaccgcatccatgagtttcagagggagatggggcaatgggtgaaagaggataaaatccactaccgcgaagaaattactgacggtttagagaatgcgccacagacgtttatcggcctgctgaagggtaaaaacttcggcaaagtggtgatccgcgtggcgggtgatgattaaagtttcaacggcggcgtaagccgccataaaaatccaggcaaaaagcttattttcagctttaattaactaaccacatcattgttctgctgctaataacaacaaaggtgagtggtttatgattattcactttaatacaccaggtgaattccttctgccatgcaggcagggttggacagaaaacacgcgaaggaattaaaatgcctggaacgggaaaaatgaaacatgtcagtttgactctgcaggttgagaacgacctgaaacatcagcttagtattggcgcattaaaacctggcgcacgcctgattactaaaaatctggcggagcaattaggtatgagtattacacctgtgcgtgaagcattattacgtctggttagcgtgaatgcgctttctgtcgcacctgcacaagcatttacagttccggaagtggggaaacgtcaattagacgaaatcaatcggatccgctacgaactggaattaatggcagttgctctggctgttgaaaacctcaccccgcaagaccttgcggaactccaggaattgctcgagaaattacagcaggcgcaagaaaagggcgacatggaacaaatcattaatgtaaacaggctatttcgcttagcgatttatcatcgcagtaatatgcccatcctgtgtgagatgattgagcaactgtgggtcaggatggggcctggtttacattatctctatgaagcgattaatccagcggaattacgggagcatatagaaaactatcatctgttactcgctgcgttaaaagcaaaagacaaagagggatgcagacattgtcttgctgaaattatgcaacaaaatattgctattttataccagcaatacaatcgttaaagtaaatgcccggcaaataccgggcatcaaggtaattactcaaatctccacgcaatattcatgccgacaccataatttcgtccggggctaggttcgtaatatcgcccgttactctcattgacaatgacagaaccaacgtattctttatcgaataaattatcgacacgaccaaataaatccacagttaaattgtggtaattgtatttatacccggtgaataagccgacgagagtataagacggcgcttttgccgtattttcatcatctgccataatatcgcccatataacgcgcttccgtgcctgcataccaaccatcttccggtacataacctatgctcgcaaagcccatattacgggcgatccctggcatccgattaccgttacaatcctgttcattgcaaacattgctgcgataggtcgcatcaagccaggtccaggacgcgtttacgcgaaaatctcctgcgaaacgttgatcccatgccagttcagcgccttgacgacgggtctttccggcatttttgtaagtcgtacgcccaccgctactgctatcgacaacaatttcatcatcagtgtcggtctgaaacaatgcgagactaagcagcccatcaccaatacgcgttttactgccgatctcaattgtatcgttggtggatggttttaaacctaagttcataccgctttgcccatcagcacgataagacagctcattaatcgtcggcgtttcaaaacctcgcccggctgccagatagatattccaggcatcggtcattgcatattttaagctaccggcaggtagccatttatgataactggcatcaccgctgtcatcgccgttacccggagtaacgtaatggtcgttggaatcaaaccacacggagctgtagcgcacgccagcatccaggctcagtttttcgctcagctgccactgcgtctgtaaatagggatcgatgttccacatcagattgcgttcgtcgcgacgcaactcacctttttgcccgtactccggcatgccgctattcaggcggaagttattgtagcccttgcggttttcactcatgttttcgtagttcaggccggtagtgaacgtgaccggaacgcccagttcaccacggtgtgtccagcggctgtctattccctggtaatggcgttgcagggtaatcacgccgcccgcatgactcgggttaagttgtggtgccatgggtatactctggtactgggtcgtttctcgctctccggcatacatcatcacactcatatcatcccggctactcaggctacgctcatagcgcaacccagcctgagtttgcttgatggtttttcgcgtgtcgtactgttctgcacgaggcgcttgttgtggattagccttccattctgctttggttagcccacctgggtcatctgctttgatatccacactattgaaaatcagacttaatttgctggcttcatcaatgcgtacgcccagtttggcattggctaaatttttctgtgcgccactatggtcacgatagccgtgggtcgtaaaacgcgtggtactgacggtgtaatcgacatcgccaggctgtgtgccgtctcccgttgcgcccgttgctttcagcccatagcgccagctgccaaaactgccgtagtaactactggcttcaatggttggtggctgttgtccggtctgggtggtgacattcattaccccaccagacgcgttgccatacagggcagagaaggggccacgcagcacttccacattttgcacactgcttaaatcgatgttggatgtttgcccttgcccgtcgggcatggtggcgggaataccgtccacatacaggcgaataccgcgaataccgtaagtggagcgggagccaaatccgcgaatgctcagctgtaaatcttgcgcatagttctgccggttttgtacctgcaaaccaggcacgccggtcagactttcggacaagttaatgcgcggtgttgccaggcgcatctcctcgccatccaccacgcttactgctgctggggtatccagttcactaaccacctgcggtgcggcactgacaatcatagtctgttcatcagcggcaaaaacaacgggggaaaggacaagcagtgcgggcaaaacggtctgtcggacggaaaaaatcttcatgaaaaaagccaggttaagaatgggaaaacgccgtcatggtaatgaaattgtaaatttatggaaaatgaaacggcacaatacgttaagtaattgagaaaattgtagtcgtaacggcaagaaatgctccacatttgagaaaataatgattaccattcccatttataacaagagcgtaacgatgattacgcttagcgaagcattgtgaagcagcaaaaatatcggttcatcaaagggagtcgtcatgcatttacgtcatctgtttagtagccgcctgcgtggtagtttactgttaggtagtttgcttgttgttagtagtttcagtacgcaggccgcagaagaaatgctgcgtaaagcggtaggtaaaggtgcctacgaaatggcttatagccagcaagaaaacgcgctgtggctcgccactagccaaagccgcaaactggataaaggtggcgtggtttatcgtcttgatccggtcactctggaagtgacgcaggcgatccataacgatctcaagccgtttggtgccaccatcaataacacgactcagacgttgtggtttggtaacaccgtaaacagcgcggtcacggcgatagatgccaaaacgggcgaagtgaaaggccgtctggtgctggatgatcgtaagcgcacggaagaggtgcgcccgctgcaaccgcgtgagctggtagctgacgatgccacgaacaccgtttacatcagtggtattggtaaagagagcgtgatttgggtcgttgatggcgggaatatcaaactgaaaaccgccatccagaacaccggtaaaatgagtaccggtctggcgctggatagcgaaggcaaacgtctttacaccactaacgctgacggcgaattgattaccatcgacaccgccgacaataaaatcctcagccgtaaaaagctgctggatgacggcaaagagcacttctttatcaacattagccttgataccgccaggcagcgtgcatttatcaccgattctaaagccgcagaagtgttagtggtcgatacccgtaatggcaatattctggcgaaggttgcggcaccggaaagtctggctgtgctgtttaaccccgcgcgtaatgaagcctacgtaacgcatcgtcaggcaggtaaagtcagtgtgattgacgcgaaaagctataaagtggtgaaaacgttcgatacgccgactcatccaaacagcctggcgctgtctgccgatggcaaaacgctgtatgtcagtgtgaaacaaaaatccactaaacagcaggaagctacccagccagacgatgtgattcgtattgcgctgtaatagatatggcgagggtgaaaacggtgagacttgcctgccttttatcacggcgtatccggcactttcgtcagtaatctgaatttgcccggcacgtagccgggcaattttgcaattaactcgccgtttcaggcttaaacacaatttcctgtttttcttcatcttcctcgacgactggcgcagtgctgtgaatttcagcaacgcgtttgcgcacaccaaaccagcctataaccagcaaaataccgataatcggcagcgccgcgatagtataagtcccgttcgggtaatcgaacgccatcagcacaaggacactcagtaaaaacagtaatgtcagccaggaagtgaagggcgcgccaggcagtttaaaactgacatccgctgctttgccttctttaatcgctttacgcaggcgcatctggcacacgatgataaacgcccaactagcgatgattcccaggctcgcgaagttcaacacaatctcaaatacgcggctcggcaccagatagttgaggaatacgccgacgacatacacaactagtgtcgccagaatcccggcatacggcacatgctgacgactcattttcgccataaaactcggtgcggaaccgcccatcgccatactgcgcagaatacgtccggtgcagtacagaccactattcaggctggagagggcagcggtcagcaccacaatgttcataatgctgccgatatatggcacacccagtttagagaaaaacgtcacgaacggactttgccccgcctgatacgcgctccacggcaataacataaccagcaacaccacggagccgacgtaaaacaggccaatacgccaaatcacactgttaatggctttaggcaccatggtctgcggatctttacattctccggcagctgtacccaccatttcaatggaggcaaaagcaaacactacgccctgaatcaacaccagcgcaggcagcaaaccgtgggggaagaagccgccattatcggtgattaaatgaaagccagtggtgttgccatccagcggctgaccactaccgaggaacactgtacccacgaccaaaaaggtcacaatggcgagcactttaataagcgcaaaccagaactccatctccgcaaaccatttcacaccgatcatattcatggtgccaacgatggtaagtgcagcgagcgcaaagacccactgcggcacgccgccaaacgcaccccagtaatgcatatacagagcgacggcggtaatatcaacaatccccgtcatcgcccagttgatgaagtacatccagccagcaacataagcggctttctcacccaaaaactcacgggcataagaaacaaaactgccactggaagggcggtgtagcaccagctcacccaatgcacgcagaataaaaaagctaaacaagccacaaattaaataaaccagtgccagtgcgggccccgccatttgcagtcgggctcctgcacctaaaaacaagccggtgccaatcgcgccgccaatggcgatcatctgcacctggcgattgcccatcgctttgtgatacccctcttcgtgggcattaagccagcggcgtttcgcggcgtgttgatcactagtgtcggtgtcgtgtttactcattgctctccctgattgctttaatgaaaaagtcatataagttgccatgaacaatgtttattcatcctggcgatgatagttatcaccattattctttatgggtataaaactatcggcgcagcatcctacccgttatcgataaacgatgcaaaacatccccttacaatcctgaaggggattaatacaactgacgaaaaaatgacaaatccttttgctggttaacctgtgtactgtcctacacttaatctttaaaagattgtgaggggcatatgattaaggtgtatggcgtacccggatggggctctacaatcagtgagctgatgctaacactggctgatattccttatcagttcgttgatgtcagtggttttgaccacgagggagctagtcgcgagttattgaaaaccctgaacccgttgtgtcaggttccgacactggcattggaaaatgacgagattatgacggagacagcggcgattgcattgatggttctcgatcgtcgcccggaccttgcgccaccggttgggcgcgccgaacgtcagctgtttcaacggctattggtctggctggttgctaatgtctatccaacattcactttcgccgattaccctgagcgttgggctcctgacgcacctgaacagttaaagaagaatgttattgaatatcgaaaaagcctttatatctggttgaatagccagctcactgctgaaccttatgcgtttggtgagcaactaacgctggtggactgttatctttgcactatgcgcacatgggggcctgggcatgaatggtttcaggataatgccacgaatatcagtgcgattgctgatgctgtatgtcagttaccgaaattacaagaagtattaaaaaggaatgaaattatttgagtgggataccagaagattatgttatttattattcagtaactttatccacaatgatgggcgtaattaattaaattcatggtatgttttttaatttatatcactctccttttcattcagcgtgtctatttcatttcctctgaaaagaaactaactattcacatcgtgcagatgtttcagttgttaagtcaggcattctataatctcaaaatgtttttaatgatggatatgctcggagttggagatgcaattaatattaatacaaataaaaatatccggcaggtatgctaaaaggataaatggcgttctctgtatttattcgcaattatctgtaggacaaatatggagagcttgatgagtcagagctaaaacagcaattgattaataaacatgttgatttattcaagaaaatggatgtattttaaatgttgattcttaatataacctaatcaatagattatcaagtgagagctacacattattggaggggcaggggaaaacaccattttgggaacaatgcatcaggtactcttaccactgaagcaagatcatccggcaccaggtggtggtgcagtgctttggaaatggtcccctcgggggagttgtcattattttctatgctatttgcttattatattcatcaggtgaatttaataaattcctaatttgaaatatccactattaagctagtgtttaacgacgttaagatggcaatgtgcagatcatgttatcagggtggggcggtagcgtatattccttatacaaaccatcattcatttcaatgattgttattgaattatttattgttgtgaataaaaagacattatgaatattggtttgactttgcatatcaggttttttattactcgctgtaatgtacgagcctgtcgtgaataacgtcgagaacccatccgttgcgtttgtgattattttgttgactaaacagacacccgtttctctgaagtaaaatcccagactaaatcatcacataaccatgacatttttctgatattccccggtaacgccagataacgatgccaaatttaccgttatgttcaatcaactccctggtccatgtcgatttatctaccacaatcgccacgcgtggaggttcaaactccaccggcattgaccaggctgcagccataatgttacgccgctgggattgctcatcgaaactggtgatcaagaccgttgggccatgatttaacagacggctggcatggtgtaattctatggggatgaatcggctcatggtatcgcctcgcgaagaaggtttttttaagcgtagtccgtaacgcaataagtaacgaaattaacgggattggcgatttgcgaacgtgatgcatgtccgcgatcgcacaaaatagccggtgcggcgtctattccaggttataagttgagaaaaccactaagggaaacgcctgatgacgcccattctgaatcactattttgcccgtattaactggagcggagctgctgcggtcaatattgatacgcttcgtgcattgcacctgaaacacaattgcaccattccgtttgaaaacctcgacgttttgctgccgagggaaatacagcttgataatcaaagcccggaagagaaactggtgatagcccgtcgtggcggttactgttttgagcagaatggcgtgtttgagcgggtgttacgcgagctggggtttaacgttcgcagcttgttagggcgcgtagtgttaagtaatccgccagcattaccgccgcgcacccatcgtttgctgttggtggaactggaagaggaaaaatggattgctgatgtcggtttcggtgggcagacgctaaccgcgccgattcgtttagtttccgatctcgtgcagaccacgccacacggagagtatcggttgttgcaggagggtgatgattgggtgttgcagtttaatcatcatcagcattggcagagcatgtaccgttttgatctctgcgagcagcaacaaagcgattatgtgatgggcaatttctggagcgcgcactggccgcagagccattttcgccatcatttgctgatgtgccgccatttgccggacggcggcaagctgacactgaccaattttcattttacccattatgaaaatgggcacgcggtggagcagcgaaatctaccggatgtggcgagtttatatgctgtgatgcaagaacagtttggtctgggcgtggatgatgcgaaacatggctttaccgtggatgagttagcgctggtgatggcggcgtttgatacgcacccggaggcgggaaaataatttatgtcaggttgccggatgcggcgtaaacgccttatccggcatacattagcccggttgtagacctgacaggcgaagcgcatcagacaacggtttcagagttcaattgcccattcggcatgaaacaaaatcaccgctgtgccactaatggtgactttttccggttggttatcacgaattgtcaccgtcacttcaatcataccgtcacgccccaatgcgcgcccctgatggcctttaacacgcaacacgttgccatcgtggggcaatacgttgtgatgtaccaaccatgcacccatcgggccattggcattgccagtcaccggatcttccacaataccaatcgcagggctgaacatgcgaccatcggtttcgtttttgcctgggcggatctggaacgggaagaaaccattgcagccaatctttttgctgatagcggtcagcgcattaaggtcagggctaagggcgtcgatatccacttccggtttcagtgggatcatcactttactgtgtcctgttgttgccacctgaattggcaagcctggcagaatatcgtcctcagtgagatgaagcgcgttgataatcgccgcacgtgtttcaccttccagcggtggctcaaagcccggcgtaccttgttccaggctaatacgataatcatcgttgtgcttttcgatagtcacgcgatgttttcctgccaggcttgtttgccagatcgtgcaatttcctaaacctaacaccttcgcacgtacatagtgcgcagctactgtcgcgtgaccgcaaatcggcacttcaaccgttggcgtaaagtagcggatgcgcacatcgctgtcgtcgctgtgcagcagaaaagcagtttcgctatggcctaactcgcgggcgataagctgcatttgcgcttcgctaagattatcggcggggaaaacaacaccggcagaattgccgcgaaacggttgactggtaaaagcatcgacgtggtacacctgcggtttcattaacgttctcctgtgactggagaactatcatagcctgcaagtggccggagagcgaagggctatccggccagggtgaaattatcgccggctacgcacaatttgatatcgacgagtaaagtactcaaacggcgcgctccacacatgcaccagtcgggtgaacgggaagagcaggaagatggtcattcccaacaccagatgcaggcggaagacgaacgctacgccgttgagcatctcactgcttccaccacggaaagtgacaatgctttgcgcccaacccaccagcttcatcatttcgctaccatcaggatactgtgcactaaacggtatggtacttagccccaacagacactggatcagcaaaatgctcatgatgatgatatccggcgtagtggaagtggcacgcacgcgctgatttgtcagcctgcgccacagcagtcctgcgccgccaatcaacgtcaacacaccgcaaataccgccgagcaccatcgccatgagttgtttcgctgccactggcaaaaaccacgcgtacatccagtgcggcgttaacatgccgaacaagtgcccgaagaaaatccccaaaatgccgatatggaacagattgctccatatcaccatcccgcgtttatcgagcatttgactactggaggcgcgccaggtgtactgcccgtagtcgtagcgcagccagctgccgaggaaaaacaccgtcgcacaaatgtacgggtagatatcgtaaaaaaagacgttcagatactgaatcatttcccacctcccgcactgatgtcgacatattgcggcgcgacatcctggctaaagcgtcgctgatattgattaagcgggctgctgtcacacgccgtggcgttatcttcaataaacttcacctgttcctcttcccacactgcatcaagcgcctggcgggtgtcatcgcgctcttcgctgtttacttgttttgtgacactgtcactactaagggagcttcccgccagttgcagcagagcatcaaacaacgcgtaccacggtgcctcgcgttgttttaagcgaccgccaagcagggcgaggatcggcgcaacattgagcaatccttctttcgcctgatcgtcaggcagtacgcttaaatactccagatacagcggtagataatcgggcagttcccgacaatccagctgcaggccgaccttttcatactccgccagcaggtccaccattgcctggccgcgatcgcgggactcggcatgaacatgttcgaacagcagcaggctcgtggtgcgcccgcggtcaaacacttcgcaccattcggcctgtttatccagcagcggcgcgttaagcaggttgtgggtgaaatccgtaagcatcggcgcgtcgcggcggatcaacgccagcgcgtcctccttgcattcccacaacagctcgtccggatactccatcaacaggccgatcactttgaggatctgcattattcgccctccgctttgtcgcgcacttcggtgatgttgatggcatcgatacggctactgttgaacaggttgaatttactgtcgctaccgtggcaaccgtcgccaaaggtaaaaccgcagccgttgcgttctgcgaaggcatcgcccgccatttcccgatggctggtcgggataacaaaacgatcttcatagttggcaatggcgagatagcgatacatctcttcgacctgggcgacgctcaggcctacttcgtcgatggcacgagtatcagtaacgccttccacggtttgactacgcatatagtggcgcatcgccatcatccgtttcagcgcccgcagtaccggaccggtatcgccggcactcaacatattggcgagatattgcaccggaatacgcaggctttcgatggcgggcagcacgccttcgcttttcggcaaaccgcccgcatctgcgtaggactgaatcggactcagcggaggaacgtaccagaccatcggcagggtgcggtattcagggtgcaacggtagtgccagtttccagtccatcgccattttgtagactgggctacgctgggcagcgtcaatcacattttgtggaataccttgtttcagggcttcctcgatcacactgggatcgtgtggatcgaggaacacttcgcactggcgttcatagaggtcaacttcgcgctcggtgctcgccgcttcctcgatgcggtcggcgtcgtaaagcagcacgcccagataccggatgcgacccacgcaggtttcactgcacacggtcggttgaccggactcaattcgtgggtaacagaagatgcatttttcactcttgccgcttttccagttgaagtagatttttttgtacggacaaccgcttatgcacaaacgccagccacggcatttatcctgatcaatcagcacaatgccgtcttcttcgcgtttgtagatagcgccgcttgggcaggtcgccacgcagctgggattgaggcagtgttcgcacaggcgcggcaggtacatcatgaaggtgttttcaaactgcccgtacatctccttttgcatggcctcgaagttgcggtcgcgggcacgtttttcgaactcaccgcccagcagttcttcccagtttggcccccagatcactttgtccatccgtttgccgtcaatcagactacgcgggcgagcagtaggaatatgtttgccttccggtgcgctatgcaaatgttcgtagtcgaaggtgaaaggttcgtagtaatcatcaatctgcggcaccaccgggttggcgaagattttggttattacgcccatcttgttgcccagacgcgggcgtatcttgccattcacatcacgcacccagccgccttgccactcttcctgatcttcccagtttttcggataaccaatgcccggtttggtttcgacgttgttaaaccatgcgtactccatgccttcgcgcccggtccagacgtttttacaggtcacgctacaggtatggcagccgatacatttgtcgaggttaagcaccatgccgacttgactacggattttcattttttcgcctcctgtacctgatcgcgaccttcatcatccagccagttaacgttcttcatcttgcggatcatgatgaactcatcgcggttgcttccgacggtgccgtagtagttaaagccccaggccagctgcgcgtaaccgccaatcatatgcgttggtttcgggcaaacgcgggtaacgctgttatgaatgccgccgcgcatgccagttacttcgctaccaggaatattcataatgcgttcctgggcgtgatacatcatggtcatgcccggcggtacacgttggctgaccaccgcgcgggcagtcagcgcgccgttggcgttgaatacttccacccagtcgttatcgacaatggtcagttctcgggcatctgtttcgctgatccagacaatcggtccaccgcgagagagcgtcagcattagcaggttttcactgtaggtactgtgaatgccccatttctggtgcggcgtcaggaagttaagtgctttttccgggaagccgtttggcggtatctggcgcatctcactgacgctacgggtgtcgataggcgggcgataagccaccaggctttcaccaaaagcacgcatccacggatgatcctgatagagctgctggcgtccgctcagcgtgcgccacggaattaactcatgaacgttggtgtatcccgcgttataggagacgtgatcgctttccagaccggaccaggtggggctggagataattttacgcggctgcgcctgaatatcgcgaaagcgaatcttctcgtcctctttgtgcagcgccagatgggtatgttcgcgcccggtgatctcgcccagcgcctgccacgctttgactgcaacatgaccgttggtttccggtgccagtgccagaatcacttcactagcgtcaatggcggtgtcaatcagcggacgcccctgtgccgggccatcacgcttggtgtaattgagtttgccgaggaaatcgatttcatcctgggtattccagctaatccctttaccgccattgccaagtttgtccatcaatggcccgaggctggtaaagcgttcatacgtagcagggtagtcgcgctccaccgccacaatattcggcgcggttttgcctggaatcagatcgcattcgcctttgcgccagtcgagcacttcacacggctgactgagctctgccggagagtcatgcagtaggggttgtaataccacgtcggtttctttgccaagatgacccacgcacacttggctaaatgctttggcgatacctttgtagatttcccagtcgctgcgactttcccacgccggatcgaccgccgcagaaagcggatgaataaacggatgcatatcgctggtgttcatatcgtctttttcgtaccaggtggcggtgggcagaacgatatcggagaacaggcaggtactggacatgcggaagtcgagcgtcaccagcaggtcgagcttgccttcaatcgctgcagtttgccactcgacttcttccggtttgatcccgtcgctggcaccgagttcctcgccctgaatcccgctttcggtccccagcagatacttctgcatatactcgtggcctttgccggaggagccaagcaggttagagcgccagacaaacaaattacgcggatgattgctgctgctatctggttgttcgcaggccatacgtaaatcgccgcttttcagcgcctgggcggtaaattctgtgggggataatccggccttgtcggcttcagctttaatcccgagcgggttacgccccagctgcggcgcagaaggtagccagcccatacgttcggcgcgaacgttgaaatcaatcagatgaccgctgtacttactggcatcggcgagcggactaagtaactcctgagcagagactttttcatagcgccattggctggaatgattgtagaaaaagctggtgctgttcatttggcgcggtggtcggttccagtcgagcgcaaaggccagtggcaaccagccggtttgtgggcgcagtttttcctggccgacatagtgtgcccagccgccaccgctttgcccgacacaaccgcagaagatcagcatattgatcatcccgcggtagttcatgtccatgtgataccagtggttaacacctgcgccgaggataatcatgctgcgcccatgcgttttatgggcggtatcggcaaattcacgggcgatggtttcaatatactggcgcggcacgccggtaatttgctcaccccaggctggggtgtacggtttgatttcagcgtaatctttcgcactgttttcatcttccagcccgcgatcgaggccgtaattcgccagtaccaaatcataaacgctgaccaccggacaggtgttgccatcgactaacgtcaggtttttaacgggcaattggcgcaccagcaccggattgtgttttacgctgcgaaaatgcggattttcaatgccgccaaagtaggggaaggccacgcctgcaacagcgtcatgttgaccgagcagggttaagctcaattcggtttccgtaccggcggcaatggattccagattccatttgcctttttctccccagcggaaaccaatgctaccgttcggcactaccaattcacctgcggtattaactgctacggttttccactgcggattgttgctttcgcccagtccatccaccaggtcagatgcgcggatcatgcgcccgggaacgtagctaccatcgtcgcgaggctccagcattaccagcatcggcatgtcgctgtagcggcggcagtagttgataaagtagtcgctgggattatcgagatgaaactcttttaaaatcacatggcccattgccatcgccagggcgctatcagtgccttgtttcggtgccagccactggtcgcacaatttggccacttcagagtagtcaggggtaatggcgatggttttagtgcctttgtagcgtacttcggtaaagaagtgggcgtccggcgtacgtgtctgcggtacgttagacccccaggcgatgatgtagctggagttataccagtcggcagattccggtacgtcggtttgctcgccccaggtcatcgggctggcgggcggcaggtcgcaataccagtcgtagaaacttaaacaggtgccgccaagcaggctcagataacgcgttccggcggcgtaagaaaccatgctcatcgccgggatcgggctgaaaccggcaacgcgatccgggccgtaggttttgatggtccagacgttagcggcggcaatcagctggtttagttcctgccagttggagcggataaacccgccgcgcccacgcacttgtttgtagctcaggcacttttgcggatcgttcataatgcttgcccacgccagtaccggatcgctgtgttgcttgagggcttcgcgccacagttcaatcagtcgtttacgaatgagcgggtatttcaggcggttagcgctgtaaagataccaggagtaacttgcgccacgcgggcagccgcgaggttcatgattgggcaggtcagggcgagtgcgcgggtagtcggtctgttggatttcccaggtcaccagaccatttttaacgtagattttccagctacaggagcctgtacagttaacaccgtgggtggaacgcacgattttgtcgaactgccaacgctggcgatagctgtcctcccagtcgcggttgctatgcatcacctgtccgtgaccatcggcaaaggtttcgcccttttgtttgaagtagcgaaagcgatccaaaagtttactcatgacatgactcctgctccaggaatgaattgggatctgatgccttgtcggatgcgacacggttgtacatcaggcatcgatctcttatttttggctgaacttccgccgaccataaaccagccaggtcagcagcacacaaacgatgtagaagattaaaaacactttcatcgcgccgaccggagagccggtcatattgaggctcatgccaaacgcctgcggaataaaaaagccgcccactgcgccaatggcactgataaagcccagagccgccgccgtttcggtgacggcttcttcatgagcttgctcatcactaccgcctttcatctttacccgataaatggttatctggcgaaagatgacggcgatcatctggaaagtagaaccacttcccagacccgcagtcagaaacagccccataaatacggcgtaaaaggcgatgaaattaccggagcctgtgcccggtaaggtaaggaacagcagggcactgaaaatcgccataaaaataaagttgatcaacgtcacccgcacgccgccgaacttatcggaaatagcaccaccaacgctccgcgcgatggcaccgataaatgggccaaagaacgccaggcgcagaatattcacatccgggaactgggtttttgccagcatggcaaaacccgcagaaaaaccgataaagctaccgaaggtggcaaggtaaagcaggctcagcagccagagatgcaggcgttgtaagacagggagctggtcggcaatactggcgcgactactggcgatatcattcatcccactccatgcggcgatcgtggcaatcgccagtagcggtacccaaatccatgcggcattcgccaggctcatcacgctaccgtcggcctgcggtacgccattgacgccgagaaaggcaaatacaggtacaaaaatgaccagcggtgcaaccagctgcattacacttacacctaagtttcctaatccgccattaatcccaagagcgctcccttgtttggcttttggaaagaagaaactgatattgcccatgctgctagcaaagtttgcacctgcaaaaccgcatagcaaagcgataacgataaatatcccaaaaggagtattcggattttgcacggcaattccgagccagacgcaaggaataatcaggattgcagtactaaaaaccgtccatcggcgtccaccgaatataggcaccataaaggagtagggaacacgcaataatgcgccagaaacggagggtaatgcggttaataaaaagagttgatcggtagtaaaattaaaaccgattttattgagattaacggtaactgcgctaaatagcatccagacacagaaggcaagaagtagacaactgacacttatccagagatttcttcgagcaatatgttttcctttattttcccagaaggccggattttctggtttccagtcgcgcaaaagataacgactatttttctcattttgcagtgccatattgttcctcacatgcacacattggtaatgaaaaaaagacaaaacacgaggtaaggcgcaatagccagttattagaattaaggatgaattgggtgaagtgctgattgaaagaatagataagaaagcgtaaccgcgggggcagaatggggattaagtagccagatatgtgttactaaatgtaactaacaagctaaccttcaaacggggttaatctttgaacgtatgtcatgtttcaacccttcagatcgtgaatctaaagggttacatattaactatattatcaacaagaccagacacttatagaattagtgatgatttattcattaaaaaggccaactactggaggaaaagcttctgtccagaaggtctatcggttcctctcttattgcctgattgtaataatcgttattacagtaagtattgtttatttcatctaaggtcatgtttttaacttttatattcatctggtttacaacttcctctgtcttgtaagtgtgtatattatatggggtatatgcttttttaataggatagtgaaacaattcgttatccacatctattccgtcagagtgaacttcaaatgcaccagggctaagaattgccaggccagtattaagcttaagtgctggggaaaacaaattaaataacatgagctgcatagtagggcaattgttcttcccagaaacatttaaaaaatttaagttttgctctgttttattatggggaataaagttccaatatcggatgtattattagtatcaatgtgggttattttattattgtccagtcttaaacttttgatagatggaagataagtcaggaaatcaagatttatatatttcaactggttgttagcagcgtttaatgtctgaacattgcagaagttgctatagaatattttaatttcagaaagcaaattgttgttaataagtaacgtattcaagttgggaaataagtcattgtgtaaacttgttagtttattatgggatagatccagcagtaagagttcatttttattacctgcaacaatatcagttaattgattatggctgagattcaggtattgcagccattcgcaagattctaattgcacaaactctagttgattatgtgccgcactaaaataagtaacactactaagcctatctatatcaatatttctgagagcattattattcatagatatatgtgtaatacttacatttctgccttgaggaaaatttatactctcaagagcattactattcagacttagctttacgagtctatcgtagttggttgcatcaaaatgtgtgaattggttattatcaagattgatagatgtgaagttttgcagccctggtggttgagtggttaaattaagtccacttaaatcaatggtcacttcattagtgtcatcaattatatttcttactgcagtccagtactgcatttgtgcaagtggatcattgttgatgccgttaactaatacatgccaaagatgtttactacttattagttgatcaatgtcattggttggcagtaaattgttattgcttaagtttaaatattccagttttgtagtgtttttggcgtttaaatgtgcaatatggttgtcgtttaaagtgattgttttcatcctgggatgattgtgtaatataaggtcagtgatcatattgtgatgggcacttaactcaatcagagattcttgccgcggctgccgttggcttcatcgttatagcctttaaaatcatattcccagtgaccaaaaccaatcatttgatcattgatttgcgtttctcctttaaagccgagacgggcataagttttatcaccatcgtcacgcttatcatcagtaaaataacgtagagcggtaaccttgccataaaggtcgagtttattaccatccttgttatagacttcggcagcgtgtgctacgttcgcagctaacaaaccagttacaaccaccgcaactatttttaatttcatttaacagaatccttttaattatcgttaaacgtattttctaaacgaattttaaacggcgtcatttataaatgacatactgtttttaaaatagaatggtgattaaaaacaatgagaaaaatagatgaaataatattatttatcgatatgtgatcgaagtcgaaatgagatataaggtgaattactggtatttgaaatttatttttttaatattgtcggaatttatctgattaactaccgggccgtagacccggcagttattttaaccacgacgtgtcgccagccagcagagcagggaaccgccgcagaccatcagcgcgccttgccagaagctgaagctcagcggggcgctgagcagcacggctgcaagcgcactggaaagtacaggcgtaaaatagctacctaccgccataatggtgacattgccatgcaatataccgacattccatgcagcataagcaaatcctaaggtaaatgccgcagagatgagtttaatcatgacgggcgtgctaaatatcatttctggttgtggcgtaagaaaatagtaaacccacagacttgctcccgttagcaggacaaaaacggtaattccattaaatccgcgtgcgtatttattcgttactgtgcaataggctgcccagataaacgcaccaatgaacgccaggaaataactcaatgggctggtggtgatattattgatgatttcatcataatgtaacccattgtcaccgcctaacacccaacagacgccgacgagggctaataataatccaggtacaatcaaccagttggttttctgaccattaaacagaatggcaaagagaattgtcaggctgggccacagatagttcaccatacccacttcaatcgcctgatgatgggtcgccgcataccctaaggaaagcgccagacagatttcatagctgacgaataacagactcccggcgagtaaatagcctttcgggatttgccgaatacgcggaaatccaaccgtgaagattaacagcagcccgcttaaactatagatagcagctgcgccgccgaccgggccgagcccctcactgacaccgcgaatcaatcctaccatcgtgctccacaggacgatcgctatcagccctatgagcgttgctttttgtcgtgtcatgctcgctgttttgtctctcttgccgttaaaaattaagctgaattttatagcatttttttaactggcctgtcaggcagtggtgcgtttttctaccgctattgaggtaggtcaatttgcgaaggcggattattttgtggcaaacagatgttctttttgatttcgcgcaaaaagattcagaattttactgttagtttcctcgcgcagtaatacccctgaaaaaagaggaaagcaatggacgtcagtcgcagacaattttttaaaatctgcgcgggcggtatggctggaacaacagtagcggcattgggctttgccccgaagcaagcactggctcaggcgcgaaactacaaattattacgcgctaaagagatccgtaacacctgcacatactgttccgtaggttgcgggctattgatgtatagcctgggtgatggcgcaaaaaacgccagagaagcgatttatcacattgaaggtgacccggatcatccggtaagccgtggtgcgctgtgcccgaaaggggccggtttgctggattacgtcaacagtgaaaaccgtctgcgctacccggaatatcgtgcgccaggttctgacaaatggcagcgcattagctgggaagaagcattctcccgtattgcgaagctgatgaaagctgaccgtgacgctaactttattgaaaagaacgagcagggcgtaacggtaaaccgttggctttctaccggtatgctgtgtgcctccggtgccagcaacgaaaccgggatgctgacccagaaatttgcccgctccctcgggatgctggcggtagacaaccaggcgcgcgtctgacacggaccaacggtagcaagtcttgctccaacatttggtcgcggtgcgatgaccaaccactgggtggatatcaaaaacgctaacgtcgtgatggtgatgggcggtaacgctgctgaagcgcatcccgtcggtttccgctgggcgatggaagcgaaaaacaacaacgacgcaaccttgatcgttgtcgatccccgttttacgcgtaccgcttctgtggcggatatttacgcgcctattcgttccggtacggacattacgttcctgtctggcgttttgcgctacctgatcgaaaacaacaaaatcaacgccgaatacgttaagcattacaccaacgccagcctgctggtgcgtgatgattttgctttcgaagacggtctgttcagcggctacgacgctgaaaaacgtcaatacgataaaagctcctggaactatcagctcgatgaaaacggctatgcgaaacgcgatgaaacactgactcatccgcgctgtgtgtggaacctgctgaaagagcacgtttcccgctacacgccggacgtcgttgaaaacatctgcggtacgccaaaagccgacttcctgaaagtgtgtgaagtgctggcctccaccagcgcaccggatcgcacaaccaccttcctgtacgcgctgggctggacgcagcacactgtgggtgcgcagaacatccgtactatggcgatgatccagttgctgctcggtaacatgggtatggccggtggcggcgtgaacgcattgcgtggtcactccaacattcagggcttgactgacttaggcctgctctctaccagcctgccaggttatctgacgctgccgagtgaaaaacaggttgatttgcagagctatctggaagcgaacacgccgaaagcgacgctggctgatcaggtgaactactggagcaactatccgaagttcttcgttagcctgatgaaatctttctatggcgatgccgcgcagaaagagaacaactggggctatgactggctgccgaagtgggaccagacctacgacgtcatcaagtatttcaacatgatggatgaaggcaaagtcaccggttatttctgccagggctttaacccggttgcgtccttcccggacaaaaacaaagtggtgagctgcctgagcaagctgaagtacatggtggttatcgatccgctggtgactgaaacctctaccttctggcagaaccacggtgagagcaacgatgtcgatccggcgtctattcagactgaagtattccgtctgcctagcacctgctttgctgaagaagatggttctatcgctaactccggtcgctggttgcagtggcactggaaaggtcaggacgcgccgggcgaagcgcgtaacgacggtgaaattctggcgggtatctaccatcatctgcgcgagctgtaccagtccgaaggtggtaaaggcgtagaaccgctgatgaagatgagctggaactacaagcagccgcacgaaccgcaatctgacgaagtggctaaagagaacaacggctacgcgctggaagatctctatgacgctaatggcgtgcttattgcgaagaaaggtcagttgctgagtagctttgcgcatctgcgtgatgacggtacaaccgcatcttcttgctggatctacaccggtagctggacagagcagggcaaccagatggctaaccgcgataactccgacccgtccggtctggggaatacgctgggatgggcctgggcgtggccgctcaaccgtcgcgtgctgtacaaccgtgctagcgcggatatcaacggtaaaccgtgggatccgaaacggatgctgatccagtggaacggcagcaagtggacgggtaacgatattcctgacttcggcaatgccgcaccgggtacgccaaccgggccgtttatcatgcagccggaagggatgggacgcctgtttgccatcaacaaaatggcggaaggtccgttcccggaacactacgagccgattgaaacgccgctgggcactaacccgctgcatccgaacgtggtgtctaacccggttgttcgtctgtatgaacaagacgcgctgcggatgggtaaaaaagagcagttcccgtatgtgggtacgacctatcgtctgaccgagcacttccacacctggaccaagcacgcattgctcaacgcaattgctcagccggaacagtttgtggaaatcagcgaaacgctggcggcggcgaaaggcattaataatggcgatcgtgtcactgtctccagcaagcgtggctttatccgcgcggtggctgtggtaacgcgtcgtctgaaaccgctgaatgtaaatggtcagcaggttgaaacggtgggtattccaatccactggggctttgagggtgtcgcgcgtaaaggttatatcgctaacactctgacgccgaatgtcggtgatgcaaacagccaaacgccggaatataaagcgttcttagtcaacatcgagaaggcgtaagggggcgaacagatggctatggaaacgcaggacattatcaaaaggtccgcaactaactccatcacgccgccttctcaggtgcgtgattacaaagcagaagtcgcaaaacttatcgacgtttccacctgtatcggctgtaaagcctgtcaggtggcgtgtagcgagtggaacgacatccgtgatgaagtggggcactgcgtcggggtttacgataaccccgccgatctgagcgccaagtcctggacggtgatgcgctttagcgaaaccgaacagaacggcaagctggagtggctgatccgtaaagacggctgtatgcactgtgaagatcccggctgcctgaaggcgtgcccgtctgctggtgcaatcattcagtacgctaacgggattgtcgatttccagagcgaaaactgcatcggctgtggttactgcattgccgggtgtccgtttaatattccgcgcctcaacaaagaggataaccgggtatataaatgcacgctctgcgtcgatcgcgtcagcgtcggccaggaaccggcttgtgtgaaaacctgtccgaccggggctatccacttcggcaccaagaaggagatgctggagctggcggaacagcgcgtggcgaaactgaaagcgcgtggttacgaacatgctggcgtctacaacccggaaggggtcggtggtacgcacgttatgtacgtgctgcatcacgccgatcagccggagctgtatcacggtctgccgaaagatccgaagatcgacaccagcgtaagcctgtggaaaggcgcgttgaaaccgctggcagcggctggctttattgccacttttgccgggttgattttccactacatcggtattggcccgaataaggaagtggacgatgacgaggaggatcatcatgagtaagagcaaaatgattgtgcgcaccaaatttattgatcgcgcctgtcactggaccgtggtgatttgcttcttcctggtggcgctgtccgggattagcttcttcttcccgacgctgcaatggctgacgcaaaccttcggtacgccgcagatgggacgcattttgcacccgttcttcggcattgcgattttcgtcgcactgatgtttatgtttgtgcgttttgtgcatcacaacatcccggataagaaagatattccgtggctgttgaacattgtcgaagtattgaaaggcaatgagcataaagtggcggatgtcggtaagtacaacgccgggcaaaagatgatgttctggagcatcatgagcatgattttcgtgctgctggtgaccggggtgattatctggcgtccgtactttgcgcagtacttcccgatgcaggttgttcgctacagcctgctgatccacgcggctgcgggtatcatcctgatccacgccatcctgatccatatgtatatggcattttgggtgaaaggaagcattaaagggatgatcgaagggaaggtaagtcgtcgctgggcgaagaaacaccatccgcgctggtatcgtgaaatcgagaaggcagaagcgaaaaaagagagtgaagaagggatataatctcttttgaactttaagctgaaaatggcgctgtaaaaggcgccattttcatattgtagacaacgtaggctttgttcatgccggatgcggcgtgaacgccttatccggcatgaaaacccttcaaatccaatagattgcagtgaacgtgtaggcctgataagcgtagcgcatcaggcaatgttgcgtttgtcatcagtttcaaatggcgctgtaaaaggcgtcattttcatattgtagacaacgtaggctttgttcatgccggatgcggcgtgaacgccttatccggcatgaaaacccttcaaatccaatagattgcagtgaacgtgtaggcctgataagcgtagcgcatcaggcaatgttgcgtttgtcatcagttctaaatggcgctttataaagtgccatttttttattgcgtaaccagacggcgtaatcggctcacatccactgttttttctgcctctgccagactccaggcgttttgcagattcagccacatttgcgggctactgccgatcaccacggaaagtttaatcgccatttctggcgtcaaagctgcttttcctgtcagcaatcggcttgccgtactgggagcaatttccattgctctggcaaactcgcgcaggctgacattaagttcgtccagactttcctgaataatgtcccccgggcggggatgattggccattttcattagtgtctttactctcagtagcgttccttcactgggaacactatcattattgttccttcctacgcaacaataatccatttagccatttcatgttggagagtgtgcgatgctgcgacccgaacatggcagtcgcagcaaaggcctcttagtgacggaaatcaatcaccatgcggccacggattttgccttcttccatctcagtaaagatggtgttgatgtccgctaacggacgcagggcgactttcggcaccactttaccttcggcggcaaactggaaggcttcagttaaatcctggcgcgtgccgaccaggctaccgaccacttcaataccatccagcacaagacgtgggatatccaggctcatagactccggcggtagaccgacagccacaacacgaccgcctgcacggacagcatcaactgcgctgttaaacgcagctttagctaccgctgttaccaccgcagcgtgagcgccaccagttttctcctgcacaattttggcggcgtcttcggtgtgactgttaatcgctaaatctgcgcccatttcggttgccagttttaactgctcatcattgacatcaatggcgatcactttggcgttaaagacattcttcgcgtattgcagggcgaggttacccagaccgccaagaccgtagatagcaatccactgccctggacgaattttactcagcttaacggctttgtaggtggtgactcccgcacaggtaatgctgctggccgccgcgctgtccagaccatctggcacttttaccgcgtaatcggcgaccacgatgcactcttccgccatcccgccatcaacgctgtatccggcatttttaacactacggcagagcgtttcgttaccactgttacagtattcgcaatgaccgcatccttcgtagaaccacgccacgctggcacgatcgcctggttttaaactggtgacacctggacccacttctgccaccacaccgatgccttcatggcccagaattacgccggttttgtcaccaaaatcgccattcttaacatgaagatcggtatgacatacaccacaacactccattttcagcagggcttcgccatgtttcagactgcgcagtgttttatacgtaacgtcaacatgatgatccttcgtaacaactgcagccttcatagttcctccttttcggatgatgttctgcatagcaggtgaggcaaatgagatttattcgccactacccagtatggatgagatctgaaaaagggagagggaaatagcccggtagccttcactaccgggcgcaggcttagatggaggtacggcggtagtcgcggtattcggcttgccagaaattatcgtcaatggcctgttgcagggcttcggcagaggttttcaccgccacgccttgctgctgcgccattttgccaaccgcaaacgcaattgcgcgggagactttctgaatatctttcagttccggcagtaccataccttcgccgttcagcaccaatggactatactgcgccagcgtttcacttgcgctcatcagcatctcatcggtgatacgactcgcgccggaagcaataacacccaggccgatgcccgggaaaataaaggcgttgttacactgggcgatagggtagattttatctttccataccactggattaaacgggctgcccgtggcgaccagcgcgttaccttcggtccaggcgataatgtcctgcggtgtggcttccacgcgactcgtcgggttagacagcggcatcacgatcggacgcggacagtgtttatgcatctcacggatgatctcttccgtaaacagcccggtctgtccactgacgccaatcagaatatctggttttacattgcgcaccacatccagcagactcagcacatcgctgtcggtatcccagtcactgaggttttcgcgcttctgcaccagtttggtctggaaaggcagcaggttcggcatcttgtcagtcagcaagccaaagcgatcgaccataaagactttctgccgcgccgcttcctcgcttaatccttcgcgctgggtctgggagatgatcatttcggcaatgccgcatcccgcactacctgcgccaaggaagacgatttttttctcgcttaactgaccacctgccgcgcggcttgctgcgatcagtgtgccgactgttaccgccgcagtgccctgaatgtcatcgttaaaagaacaaatttcattgcgatagcggttaagtaacggcatcgcatttttttgagcaaagtcttcaaactgcaacagcacgtctggccagcgttgtttcacagcctggataaattcatcaacgaattcatagtattcgtcgtcagtgatacgcggattacgccagcccatatacagcggatcgttaagcagctgttggttgttcgttccgacatccagcaccaccggaagggtatacgccgggctgatgccgccacaggcggtatagaggctcagtttaccgatcggaatgcccatcccgccgatgccctggtcaccaagccccagaatgcgttcaccgtcagtcaccacaatcactttaatattatggttcggcacgttttgcagaatatcgtccatattgtgccggttctggtaagagataaacacgccgcgactacggcggtagatctcagaaaaacgctcacaggctgcgccgacggttggggtataaataacaggcatcatctcatcaagatgattgtttaccagacggtagaagagggtttcgttagtgtcctggatgttacgcaggtagatgtgtttgtcgatttcggttttgaatccctgatactggatccatgctcgttccgcttgttcttcgatggtttcgaccacttccggcagtaaccccagcaggttgaagttacggcgttcttccatgctgaaggcactgcctttattcaacaacggaaattccagcagtacagggccagcgtaagggatataaaggctacgctgtttttttgtttttggttccatgtcactcactcttttttgaatatccatccctggggggcttttatcgtctttgctttaccgccagggcgtcggcctcaagtataaagcagataaaaacaaaaacaccattgcgcaggcaatggtgtttaatcgtcattgaggactgatggttatgaattacttttcagcggggcgttttctgccggttgggttatttactacgctggatttgtcaccttcggtaactattttgcgctggttagaaattttatggtccagtccaagaatatgacgtgcctgacggttgcttttcattttaactcctcaatcctgtagctagttttaaggacaacatcgccgtagcgaagaaacacgtgctaaacccctaaattaggttgccgatcaagcatagcaccttaaagcgtagggtgctggccactgaccacataattgatcgtttgctggtagatatcactgaggatgtcgttatcagaagcttcaacccatttggtcagctccatgagaatgtcatcttcagtgacaacaccatgctgtgcccgaaggccttgctcaatggcattaaccagagcgggttctgctgtactattttctgcctgataataagtaaacatagtgattctccgtgtctgtgtatttatggtgtctgctacggatcgcagatttataaagcacattcagcatggcaaatatttgccgcttcgttgttaagattagtcctggttgatgatttttatattttaacaccatgatattcatagggattgtgattggtatgatccgattaatattgatacaatatcttttgggttatatattcccggtaatctattgtgggaatttaatttaagtgcagaagtaatattttcgccggattttattcggaatatcctgcttatcctcgtgctgtttctcacgtagtctataatttcctttttaagcccacaggagagcaacaatgacaatccataagaaaggtcaggcacactgggaaggcgatatcaaacgcgggaagggaacagtatccaccgagagtggcgtgctgaaccaacagccgtatggatttaacacgcgttttgaaggcgaaaaaggaaccaaccctgaagaactgattggcgcagcgcatgccgcatgtttcagtatggcgcttagtttaatgctgggggaagcgggattcacgccaacaagcattgataccaccgccgatgtgagcctggataaagtggatgccggttttgcgattacgaaaatcgcactgaagagtgaagttgcggtgccgggtattgatgcctctacctttgacggcataatccagaaagcaaaagcaggatgcccggtctctcaggtactgaaagcggaaattacgctggattaccagttgaaaagctaaagcattgccggatgacgcgtcaggcgcgtgaatgcctgatgcgttgttagcatctttacagcgcccgccagcaccggagctcacgtccgtcctcccttattgctaaactttgccggacttcacatccgtgggttgccagcgggcaacgttcgtagaaaaaacagccttgcggcaacgtgcggtttcccggcagatccgttttacgtaatgcccattcttcctccagcggtttatcaatggcggggagggaatccagcaataatcgggtgtatggatgtgcaggtgccgtcagcacctgctgcgcgtcgcccagttctacaatctgcccgagatacatcaccgccacccgatcgctcatatgacgtatcacgctgacattgtgactaatcagcacataggtcagcccgtgattttcctgtagcgttaccagtaaattgaggatctgcgcctgaacggagatatccagcgcagaggttggctcatcaagcacaatcacgtcaggctggctagagagtgctctggcaatggcgatacgttgccgctgcccgccggagaacgcatgaggcaggcggtcgagatactccggacgaatacccacctgcacagccaactcctctgccaacgctcgccgctgttgttcactactacgcttagctatccagagcggttctgtgatgatgcgccacaccggtaagcgcggattaaggctagagagcgggtcctgaaacaccatctgcataatgcgttgactgccagaacggatgtactgcccgtggctcggttgcagcatacccattaaaagctgtgcgagggtgcttttgccgcagccactctcgccgacgatccctaaggtttcaccacggcggatctgtaaatcaataccattaatggcatgaacatgttccgtagttttaccaagccagtttttacgggccgggaaattgatatggacgtcgcgtaacgttaataacgtgtcagacacttataacctcctgctgcggataccaacaggcacagcgctggttgttgtcaccacacgctgtcagcgccgggacgttttcacactgtgcacctgccgcatagcaacgatcgcgaaaagcgcagccgtcaggcaaatgggtgaggtttggtaccgtccctggaatggcgggtaatagctggcgtggtactccatgttctggtgcgcattgcagcaaaccaatggtatacggatgccggggatgatggataacgtctgccgtcacgccgctttcaattacgcttccggcatacatcacgtaaacgctatcgcacagttggctcaccacggccatatcatggctgatgaacagaaccgcagttccactggcgcgggctttatgtttaagcaaacgcagtacctgcaactgcaccgtgacgtccagcgccgtagtcggttcgtcggcaataatcaattgcggctcgcaggagaatgccagcgcaatcattacccgctggcgcataccaccactaagctcaaacggatagcggctcataacttccacggcatccgggatttgcatctcttccagcaggtcaatcgctttagctctggcttcccgacgacttattggttgatgatggcggatcacgtccatcatctgaagacctattcgacgtgtcggattgaggtcggtcatcggttcctgaaagatcatcgccactcgtgcgccgcgccactgacgaagctgtttttcccgcgcgttaagaacatcttctcccagcagggaaatctgcccccgatgtacgcaataactgcccgtcggtagcagacgcataatcagcattgcggtgacacttttaccactgccggattctcccaccagaccgacaatttcaccgcggttaatctgcaaggacacattgttgagcgcgtgaacatcaccgttaaaaccggggaaactcaaatgcagttgttgaatgtccagaacgggttgggtcatgactgctttcctcctgctttttagttcaactctgctttcctcctgctttcgggtcaagcagatcgcgaataccatcaccaaagagattaaacccgacggcggtaagcaaaatcgctgcccccggaaatgcgcaataccaccactgatcgagtacatagttgcgaccatttgctaccatcgcgccccattcagcactcggttgttgagcacccaggccaataaatcccaacgtggcggccattaaaatcgcgctaccgatatccaggcttgcctgcacgatcagcggcggtagggagttacgtaaaatatgccagttgatcagatgccaacgagacgcgccaaaggttttcgccgcctgaacataggtatactggcgtacaactaatgcttgcccccgcgccaggcgcacataaaagggaattcgcacaatagcaatagccagcatggcgttaaacaaactcggcccgagagcggcagccagtgccattgtcagtaccaagctaggaatgctcagcataatgtccatgatgcgcatgatgatggcgtctgcgcgtccaccaagcacaccggatagacatccgagtaggctaccaatcatacccgcaatggcaaccacgactaatccggcgagaatactttgctgactgccgaccagtacgcggctaaacagatcgcgtcccacttcatcggtgccaaaccagtgcgccgcagaaggcggcaaaaggcgggcggttaaatcaatggcgttgggatcatgcgtcgccagccacggactaaaaatcatcatcaatagcattaatacaatgatgactgcgctggtcacggtgagcggactgcctttcagcatccataccagttttgcaccgttaaatcgcgtttgtttttgtgggcgtacggcggacgtttcctcgcttagcatcattcaccacctccacgtccgatacgcggatcaatccacaaatagagcaaatccaccaccaggttgaccagcacataagcaaaactaaccacgacggcaaagcccatcactgccgggaagtcgagcgcctgtatacttgttactacccatgcacccattccgggccaggcaaaaacggtttcggtgagcactgcgccatacaacaaatcgcccagcgccaaacccaatacggtaatgcttgggatcaacgcattgggtagcgcataacataaaacgatataccagccgggcaagccgctggcccgggcggtacgaatgtagtcttcactcaattgttccagcatcgcactgcggatctggcgagcgacaattcccaggtgaacgaacgccagcgttaatgccggtaagatgagatgttgcaacgcattgaagaagacttcaccgttgccttcaagcagcgcatcgagcagataaaagccggtaacgtgcgttggtggatccagccagtcatcaagccttccgccgccgggaagaatttgcagatgaccataaaacagcacaatgacgcccagcccaagccagaacgcaggtgtggagattccggtaatggccattattcgcaccagatgatccagccagcgatttcgccagactgcagagagtatgcccagcgggatgccaatcaggagtgccagcagcagggcaccaaaagccagctccagcgtcgccgggaaaaatatacgcaactcttccagcaccggacgcccggtacgaatggatgttcccaggtcaccatgaaacaggtcgctgacgtagcggtaaaactgtacatacagtggctggtccagtcccagttgctggcgaatattttccacgatagcatcgctggcgcggtcacccgccagtaaccgcgccggatcaccagggatcagatggctgataataaacgtaatcacgcagacgcccgccaccacgagcaccagcccccagcagcgttggcgtaaaatactccagaaggtcacgttatttactcatggtattgatattgaagacctgttccagcatgggattgaacacaaagcctttcacctctttgttcatcgccagttggtagtttttctggaacaggtacacataagcagcgtcatcaatgacgattttctgtgcctgctggtagtcccgggtacgctgcgtctggtcggtggtcgcaagcgcattgcgcagtaacttatcgacctcactgttttcatagaagctgcggttacccggcagaccttttttgtcactctcaaaccagtaattcataaacatatacgggtcggcaaaatccggactccagttgccaatcgcaatgtcgtaatcacctttacccactctgtcgcgcatggtggcgttcgccagcttttccagcttcacaatgatgcccagcttgttgagactggattgtgtcgccagagcaataggctcccagttcggatcgttatcggagtagagaaacgtcaggctggtgggtttgctcgtcactttatcccattcggctttggctttcgtttcgtcatggttgtattgcattgccgtcgcatcgtagccccacatgccttccggaatcgggccgcgcatctgttttccgttaccactcagaatgccgttaaccatgccctgataatcggtagaccaggaaatggcccgacgcagatccgcctgattaagaggcgctttgctgttattcagatacagataggtaacgcgcagactcggatactctgccacattgactttattttcctgcttcagggcgttgagttgatccaccggcagcgcatcggcaatgtcaatgtcgccacgggagagctgcaggcgacgggaggcactttcaccaataatttttacgcttacccgtttgaagttcggtttattgcctgggtaatgcggatttggcaccagaactaattgctgacctttttgccagcttttcagcataaatggtccggaaccggcggtattttgcgcgaggaagccgcgagcatcatccgctgcatgttcctttaagaccgccggattgataatggatgcaccgtcattcgccagcgtgtagaggaacggtgcgaatggttggctaagggtaaacttcaccgtatgttcgtcgggagcatcaatctttaaatctttgggaaatgcttctgctggcccctggccgatttttagtagccgctcaaaagaaagttttactgcttcggcagtgacaggtgtgccatcggcaaatttagcattatctttcagggtgaacgtccactctttttgatcgtcagacgctttccagctacttgccagatcgccttcaacgtcggtactgcctttatcaccgtccgttttgtactgaaccagccgctgataagacgggtaggtcactgtccagtcgttattatctattgttaccgccgggtcgagggtttgtggatcggcggccttaccaatcaccagcatatcttttggtacggcggcgtgcgcaaccgggaaatttgtggcaaggacgagcgcgagcaatgtgggacgaaagcttatgcttctcttcatgacagtttcctgattaactgacgtgctgtgtgccaggggatataaaacaagagaattgatcagcgagcagagggtaactcgctgcctggggtaattcgaagtgccaccattcgctggagataccgacaaaaccgccaccagtcattatcgcattcagcaacagccgattgcgctgagcggcgggcgggacggaagggtgataggcatgggagcgctcgtgcatttcatcgaaccctgcgcccatatcgaggatgttcccgtgctcatcacgaagcgtcaggtcgatcgccgtgccacggctgtgattagaaccgaccgtcacatcaacaacatattgcgggtctgggcaggcttgccacaacatcgcctgtgcttgttgtgggcgatacgcatcgtaaatcaccagttgtaacccactcagctgggcgatgctgatacttttcgccagcgcggtaatcgcatccttgtgtaacagacaacgcgcttgctgataaatagctttacctgtgatgttatcagcgcaggcgtatttcaattcgatctccagatcagggaagattacggctaaatcaaccagttcggtggtatcgctcataaacggttcctgtataagacaaaaattgctgcgctttccgcttatgcagatctcatgccatgccgggataagcgccagaatgctggcttaaagttatattttttaacttttgatcaacatttgtgcagcgtagtgcagttttggtgcaagaggggaagttaaggaaggaatctcccggaatcgtagctgaaatcacagtatttaagtgacagtgtcacgttaaatgaaaacccgcgagtgcgggcgagaggaatttgtcagattttcagcggtaacacgctgctcatccagcctggaatttcttcggcgggtagggggcgggaaaagaaatatccctgaataacgcgacagtggatcttgcgtagcatctcaaattgctctttggtttcgacgccttccgccacgacggttaaattgaggctttgcccaatgctggtaatggcttcaagtaaggcaaggatgcgtttttcggtcagacaacgatcgacaaaacttttgtcaattttgatttccgttaccggaagactgactaagcgggataatccggaaaagcccgtaccaaaatcatctacgcttaagcccacgcccatatcacgcaggatctgaatgcgcttaaagatttcggtatcgtgttccatcatcatgctttccgtgatttctaccgtcagctggtggccgtcaataccccaggcgtgcattgcatcagacacctgattaggcagttgattactgcgaaagtgcagcgcgctcaagttcacggataacgccgggatatgaatattctggctacgccattctgctaactgacggcaagcttccgcgatgacccagcgcccaatattttcgatttcaccaatctcttctgcgagaggaataaaccgactagggggcacatgaccatgcaggggatcgtgccagcgagcaagggcttcgatgccgtacagttcacccgtttctgcgaagatttgcggctggtaaaccagtttcagttggttattgctaatcgcttctttcagcgctgcgcctaaaaccaaacgctcttttaccatttcgttcatcgccgggctgaagaactgccagccgttaccgccattcttgcgaatataatccattgcattgtgagcagtggagagcaagtaatcgcggtttttacccaggtcgtagctgatgccaatactcaaggtaagcgggaagggtttatcgtcaatcattatcggcttgctgaccacattccgtagctcatcggcgatttgggtaatgttactgacgtcgttttcgaggctcacgaggacaaactgcgtaccttcgatacgacagagatactgatccggtttgagtttttcacgaaagcgattgaccacttccagcaatgcctgatcggcccacgcatagccaaggctatcaatcacatcctgaatatggtcaacaccgatgagatacaccacgggagagacggctttgtcgaccaggtcatcgaggtaattgtgcaggttattgcgatttggcagaccggtcatcggatcaaattggatgagttgttcaatatgctgacggcttttttcctgttccagcgccagcgcggccatatgctggctgatatctgccacgcgttcgataaaggcgctggtttctgctccactgctggttttaatttgcaggatccccgcaggcgcgccatcacgctgacgaatggtcgcactccagctttgcgcattttgaatttctgcaccgtgggaagaactcgcccagtgtatcggcatcccgttgcgcagtgcgaacaggctaacatggctttcgttgagtacagattcgatgttacgacaaatgatttcccccatttcatgaaatggcgggctgctgcacatggcggcgagaatattgccttcaagctggcgaatctgccgttcttcggtgatatcgctgaaagtcattaccaggttctgcagatgcgcgagcacgtcataaaccgggctgatagaggctttaatccagattttttcaccggtgcgcgtcaacagcagaaattcgtcctgatcgcgggcggttttccatagcaactgttgtaaacgaatgcggttatcggcagggaattcaggaatgttcaggagtgtatcgggctgcataccgctggcttcgctaatgcagtaaccaaacatttcggtaaatgcgcgattgcactgcacaatatggcgttccggatcgaggacaatcaccggtcggtcgagatggtcaacggcaataatcaattgtcgggtctgttctttttgcgccatttctacgctggcatcccgtaccagcgccaggtaataaactttcccctcggcgctcactttgcttagcgcaaaacgggtccagattttactgccgtcttttttctccagctgcagctcccgactcatcccctcaacacgcgctttaccgccttcacggttgtgacgaatgtattcaggatgcgcaggacgcaaatcccgcggaatcagcatatcaatgttattgccaatgacttcttcacgtttgtatccccagagcttctctgcggcggggttgaaaaacatcacttcatcattttcgttaattaacaccgcacccatcatattttgctcaagggcggggaaaaaaatgccatcggcggcattatccgcatcggttagcttcatgattacctctgcatcctggcgcatttaaagactggctttccagagttcaacacggtttctacctcgtcttttggcgatatacagagcttcatcggctatttgaatgaggcgctcatagtcaggatgaccattaaacatggcggcaccgatggaaagactgagggcaatatcttcgccgtttgcggctttcagtttggttttctccacccgactgcgaatacgttctgcggtacgtaacgtttcgttttcagaagcttcagtcaaaacaatgataaattcatcgcccccgtagcggaaaacataatcactactgcggacgttgtcataaaaggcctgagagactttacgcagaatttcatcaccagtgttatggccccacgtatcgttgatctctttgaatttatcaacgtcaataatcagcacactcagcggtgtaccggtccggttggcatgggcaatttcgcgtttgaagatagtcggtaggaaacggcggttaagtaatttcgtcagtacatccataccgacttcgtggcggcttacttcttcaaacaattcacgcagcaaggtaataatttggcttacggtatttcttatctgtaataaaaatttcacccgcagacttctgttattcaaatttctggtgttacgcatggtttgattgaaaataccgtcgaaatcctgaatcagacgggagatatggcctacttcggcaataccactaaaataatgtcgacctttatggttaaaccacaggccaaaatcagcctggcttaaaggcaaactactgcctaaatcagaatccagcaggattttatagataatatctatttcccaactaagtatactggctatttgccgttctttttcttcttcggcgttttccagtaagctgaagatacgatagttttcatcttccttactggcactactgtcactaaaggtaaacgcgcgagtcatcacttccatcgcgatatcaatactgttaatgctgaaatggtagacctgaagtttttctgcggcggaataatcgctagagaagatcaccggatagaggatttttttcagcacccgaaaccccatctcgacaatttctaccggaattcctatgcgggcatgcacttccgcgacggtatgctggatttgtattagcctttcgacatcgtcaacctgggcagaaagcacgttaataatccagcgttccatcgcactcttcaactgccgctcaacttgttcattactcaagaattcttcggcatgcgggtcgatgcggacaattcgataaaactcgatactcagataatgagcatgcgcaacggcaatttccgcggctttagcacgaatgggcggatctgcctgttcgacaagtccggtccactcatctttcattcttttaaaatacatctccataattcacacccttataaggctgggaaatcagacggaatcaaaatgaaacgcaacgtgcgagatcgactaactgcaccatattctcctgaaatatgaagatatactgaaaagaaataagcgatttaggacagtttcaatctacgctactgttcttcagaagagtatagcccatcgtaattatttttcggtgacagcgaatatcgtatggtttttcatattcatacatttttattagggatttatggctgtttaactaagtgtggttaatttgacttaagtaagcatgattattagtgggatagtttaagagggtaacaagccggtgggtaaagcaccggcttgttacaaagtaagaatgggagtttaactgccccagcgactttgcagatagctgaccgcttgttgagtctgcggtttattcagatagtcctcacggaacaagatggtgccgctaatttcgggcacagcatcgttaagatcgagctgctttttcagttccggtacgccgccgttaatcatccagtctggctctatcttactaggttcacccactttatagaaggcgataccgatatacaggcgggtcctggtcggtttaacgacatccgcccaccattttgccaacacgtcataacgcgcggcactccgactgaacggccagtaaatttggggagcaatgtaatccagcaatccttgttccacccatcgacgggtgtcagcgtaggattcgtcataggctgccgcgcctcgggtatcggaaccgagcggatcgtgacttcggttacgccacacgcctgccgggctaacaccaaattcgactcccggcttaatgcttttaatggtgtggcttacctttgcaattaactgctgagtattgttgcgccgccagtctgctttactcgcaaatgcgcctccgtatttacggtacgtttcgttatcatttagccgactacccggactctccgtatagaaatagtcgtcaaactgcacgccatctacgggatagcgggaaaccacttctgcgactatacttgtgatccagtcctgaacctcagggatgcccgggtcgaggacaaagcgatcgccagacgttctgatccagtcgcggtgttgcacatagacgctcgccggttgttgagacagagtgctattcagttccctgatagtaccgggcttcgtattaacgcttacgcgataggggttaaaccaggcgtgtactttcatcccacgcttgtgggcttcgtcgagcataaattgcagcggatcgtaacccggattttcaccaatcttaccggtcataagatcggaccacggcaaaattttgcttggccacagggcggtaccgtccggcttgacctggaaaaagaccgtgtttatgccgagacgttgcagatgatccagtttgtcgatcatcgcctgttgttgtacacgggcccggctggtggggttactaatgttaacgctggaaaccggtggccagtcgagccgagaaaccgtggccagccagatgccacgcatcggttgactgctttgttgcgtcgtggctggtggcttactacctgctggtggtgtcaccatggactctggaggcgtgcttttacaactacacagtaaaagtgccagtgcaactagtatcgctggtcttctaatcgttaatttcttgtttcgggagcagatatccatatgtgctggtttccggtaaacagatgtgcgctcattctcgtacttatccccgttaagtcaatacgacagcaagcacgaaaaagggagcgatgaattatcgctcccttgtcttataaccattcagacatggttagtgtttcttgtcattcatcacaatatagtgtggactacgtgcacgcgggtgcaggaagaagtgaccttttggtgcgttctgactgttgattggctccagagtgacgccggtatttgctttgcctttacgatcatgaacagcatagagaataaagggcagggcaagtaccaccaggaaactaacaaccagtaattcaacatacatatcggtagaatcaccctggatgttatccggcggcaggaaggaaacaataaacgccataatactagtcagcagaccgacaattgccacgaccagtttcacccctttaccaccagggatattaaatgtgcgttttaagtcaggatgtttaagaaccaacacaatgtagccaataaacagcatgaaataagcacacagataaatcaccaccgtcagcgccagtgcgatcaggaaggacatgttgttaccgccaccggtattggtgaggatgatcaacgcgatagacgtaatcaccagctggctaatgaccagcgttaccggtacgccatttttgttcattttagcgaatgccgctggcagcaggtttttctgcgctgttacatacatcccgcgagaaggaccaacaatccaggaggcgatttccgccagaacacccagcaacagcagtgcggagatcacgcgaaccgtccactcaatttctggtgccacatgggacatcagaacggtaaaggtttgcattacccctgcggagaggttgatttcattacccggaatgaccatcgcaatagacaaaccaccaacagagcttaagcagattgccgccaccatcagcagtaacatagccaacggatagtcgcgccctgggttgctcatttcattgacgtgggttgcggatgcttctacgcccatataactcaaaatgaaggcaacaaatactaccagggtgcccactttagagaagtcagggaagaaggtcttgctatccatttcgatagcaacgggggcaccggagtgcagataaatagccgctaatgcgatcaaaataaatgcaggtaacaggataccggcgaagaagccaactttagcaattcgcgccgtgtatttcgtgccaccaaactgcgttaatgccagcgcccaaagaatgatgagtgctgcaatagttttggtaatggggtcttcattcagcgctggccatttcaggatgtaggagagtgcccctaacacgaaatagagcatcggaataaaaccaatggcgatttgcagatagccaaaactgatcgctgcaaatccccatctcggccccagagtattacttacccaggcgaagacaccaccttcttcccagccgtcgacggtggccatttccgcagcacaaagtcccacgggaataaaccataaaatcccgcctaatagcaggaagaagactaaactaaagccgcttgttgcgaaggtagggtattcataaacagccattaccatgcttgccgttatggcaaagaatccaagtaatgtgagctgcttagctttacctgtctgtacacttgtagccatattatccccctaaaacggtattcctgtcggaaccgcacctgttttgttctgaagcgtattcagaacaatattttccgttgctaatgccagtgaacagactttggaaattgtcccgaaacgggttcgtttcgggacaccgttaccgttaaacgttatcaggtatgtttaaagctgttctgttgggcaataccctgcagtttcgggtgatcgctgagatatttcagggaggctttgtagtcttccagcaacagttcagcaaagtccatttcgaagccgcgacgacacataatgcgcatcaccacgatgtcggtggcttcaccgccgagagtgaaggccggaacctgccagccgcgcagacgcagacgttcagagaggtcatacagggtgtatcccggatcttcaccatctttcagtttgaagcaaaccgccgggatgccttcgtccgggcgacccgtacagatgaactcatacggccccagtttggcgatttcatccgccagataagcggcaacctggtaagaggcgttctgtactttggtatagccttcacgaccgaggcgcaggaattcatagtactgtgcaattacctgacccgccgggcgggagaagttgatggcaaaagtaccaatttgaccacccaggtagtcaacgttgaacaccagttcctgcggcagcgcttcttcgtcacgccagataacccagccgcagcccagcggagccagaccgaatttatggccactagcactgatgcttttcacacgcggcaggcggaagtcccagacgatatccggggcgacgaacggtgccaggaagccaccgctggcagcgtcgatgtgcatgtcgatgtcgataccggtatcggcctggaatttatccagcgcatcgtgcagcggttgtgggaactcatagttaccagtgtaggtcacgccgaaagtcggcaccacgccgatggtgttttcgtcacaggcttcaatcatgcgtttcgggtccataaacaactgaccggggcgcatagggatctcacgcagctccacatcccagtagcgggcgaatttatgccagcagatttgtaccggaccgcacaccaggtttggtttatccgttggtttgcctgcagcttccatacgcttgcgccaacgccatttcatcgccatcccgccgagcatacaggcctcggaagaaccaatggtgttggtgccaacggcctgaccatttttcggcgcaggcgcatgccacagatcggcaaccatatttacgcaacgcaggtcgatggctgcggattgcggatattcttctttgtcgatccagtttttgttaatggataaatccatcaatttgtggacattttcgtcgtcccaggtctggcagaaagtggccaggttctgacgagcgttgccatcaagatataattcgtcattgataatctggaatgcgacatcgtcgcgcatttcgtgcagcggaaaacgtttactttctgcgatagtggaaatagacttcgcaccaaaacgactatcgagtagttcgctccttaaatccgttacttgcttcttatccattttaaactccttaaaatgattggatcgcattaaaaaagtaggatttatcgataaagtaagcaagtgcaaaggactcgtgtttaaataacaaaatcctaatgttatttatcgtgagatattacgcgaataatattttttcattgaaaaacaatacaatatgaaattcttgggtggtggtaaggtgttttatgctgttatttttatgcgcattctgtgtctcctgaattatcacgtaaaaatcagaccttaaaatatcactattagtacttgattattattttgaacgcatttataaaattattacataaaaatagcgaatattgctaaaatccccgccaacgatgtgttgacggggctgttattattttggcaataatactccggtataagtatttaccggatgagaaagatattgtttaacggcagtgttaacattctctaccgtcatttgtttcaacaattgctcctgctcagtccatgctgcaggatcgtcatattgaataagactatttacaatagtgttcgctaattgttgaacgctacgctgttggatatcgaggctgcgctgaacgttttgctggtattcattcagttcttgctcactgatccctttagccagacgcttaaccatcacttcattcgctaacgttaacagttcatcatgtcgttctggttgacaagtaaaagccagcaaatgactgatatctttggcctgaggatcaacgctgaggcgagaagaaacgctgtatgctccagatgcctgttcacgaatattaacacgtagatcttttgccagtgcgacgttaaaagcatcgagcgccatacgcgtcggcagattaacaggtgtccgggaatcataacgcttccactgactaacctgtgccacaggttcattttgttcttttacagtaacgcttgcgttgtccgtcgcgcgagttaatggtttacctgcggctaatgggctatcagagtgtttgatacttcctaagtaacgcgtaattaacgccacgagtttgtcttctgcgacattaccgacaatgacaaacgtgatatccgctggagaactaaacaattggcgatcggcagccagcgcatctgcggcagtaaactgtgcaatctgattttcttgcagtaatttcgtgcggtcatcagcatagcgcgtctcatacatctgctgggcgaatttctccgctggacgctggtcgagcgttttcaacgcctgaatttgagcattttgtaggcttgcccaaatattatcgttaatcgtgctgtgggtgattcgctggttaatcaactgaaaaccaggttcagggttattagtccgcgcgctaacggagagcaacgtattcatgccactgactttactgctcatggttacgctattttccgcactccagcgtttcaggctggaagaggagagttcgccaacgccgcttccgctaactgctttatttgccagcgcgataagacttttttgctgcgcagggaaacttaaatcgcctttattgcttacggcaataatttgtagcttttgctcttcacccgcggattttgccagaataaccctggcaccattggaaagtgttaaacttgtcagattctccgccagcgtttctttgctgctaatttccgcctgtgggtctgcgtctactgttaagcttaaatttctgcctgggaagacgtaagccgccagctttttgttggcgtactccttttccagcgccaggatagccgcaggagacaatgcttttttggcggcaacctcattgtttaccatttgctcccaaaatgcgtcctggttctttcttaactgctgccatttttccgccagactttgcacggtaatttgctgccacagacgtttgctaagttgatatgtctcttccgggctcaagaacggcgtattatttaaactgctggatgccaggcgactggtcagcatacgtaaatcacgttcagcttgctgatcaaccgcatttttcagccaggtgaggcgggtagatttgacatcatcgagttcttcagcagaaaaaccatgctgatcaatggttgccaactctgccattaatgcattcgcagcatcctgcatattatcgtctcgtgcatttacacggaaaaacaggctctgataatcgggtgcaattttaacgctgcgcgcagtgccgccagaaatagtcttcaactcgccgctctgtatgcgttcctgcagacgttgattgaacagctgaactaacatgctccattcagcttgttcgataaagctttgctcatcgttcacttgtaccattggcaggcgataatagagtgcgatgccgttcacccggttttctttatcattaatgatattaaagcgcaggtggttttcggcttttgtcggccagacgcgattttcagctgctttgttagccggaagcttacttaaattatcctttatcagcgccagcgcttctttactgtcgatatcgccgaccacgataaaggtcatattatttggttgataccagcgttgataaaattggcgcaattgtgccggtgtgaccgtggcgacagtatccatcaggccgataggttcacggtctaaattacgggtatttgccagcaggaaagggcggcgcgcctgagaggtgcgccatttcgcatcctgatgggcacgccattcctcagtaattacgccacgttcagcgtctacttcgagtttttcaaaggttgcggcattactccattcactgaagattgccatcacttgttgcagattttgtttctgcgtagtcggcaaactcacctgatacaccgtttcgtcatagctggtataggcattaacatcgcgaccaaaacgcaggcccatactctcaaatgtttcgatgactttattacccggccatgtttttgtgccgttaaacatcatatgttctacaaaatgagccacgccgagctcattgtcttcttcctgcaaactaccggtatgaatttgcagccataaatttacctgatcctttggatgagcatgcggataaatcatatatcgcaagccattgtccagttgcccggtaattaacttttcatcctgcggtaaggcggcggcaatcagccgcccggggagcaacagagttgccactaacgtcagtaagaaacagaggtttctcataattatctccatgcgaaaaccgggcgaatttacccggttaagtaaaatccgaactattaaaatttcatgctgacatcaagccagaaagtacggccactggcgtaggtcgccacaccggtgttcgttgtatcaacagcggttttgctatccagtacattgagaatatcggcactgatcgtcaggttttgttgttgcagaaattgtggcgtccaggacaagcgggtgtcccaggtcaggctgctatccagtttttcgtcaacatactgcttgtaatcactatattcgctgatgtattgcgcatttgtcttaccaaggataatgcgagctttacgcgcttcttgccaggccagcgtattcgcccacactaacccgctcggttgatgcgtgaaatccatgtttaaggagatctttaatgggttattaaaatctgccactggaacgctatcgtaagagaccagattaccgttataaaccacctggttatcaccggtattgctctcctcataaccattgtttaagctcaagttgcccttgctcttgatatagctaaagacaatttgtgggttaatatctacctggcggatatgcaggggttcggccagttcaaaactgaggctgaagctatgcgttttggttttgccatcgttgttatattcagtaatggtggttttagtcgcgctgtcggtacgactgcttttgctgatttgatcatgcgcttcacggtaaacatagtttgcacgcgcaataacgttcttaccgattttctgctgcaatcccattgccagttcatcgttataaggcgttttcaaatcctgataacgcgtcagagttttattaccacttacgctttccgtccagctattgcggatatcacgtaatcccatatcaagaatattcccgccatagtaacggttataacctgctgtaatcatactggtttgattagcaaaaatatcccattccgtcataaagcgcggggagatattgtggttactcagatagttgtcatagtcataccgcacgccgggcattaaactcacattacgccagctaatgcgatccgccatatacagcgtgtagttgtcaattcccaggcggcctttacctttatggtaaatggtatggttagttttctttccggcagcattaatcacataggattcagactggttatggcgttcagtccacgcatcggaatagatgtattccgcgccgaagtagggttgatggctaacattacccacggcgaatttttgccagtccaggcgtgttttgaaggtgtaattatctacagcctgggaaatgtgtcctaatccgccacgggtgcaacgccctgtaatatcaccatatgtacaactaagttcggtgtaccagatgtcatgatcgtgacgggtataatcactaatatgatcccaaccaacggtggtacgcagtttggcccatgcgagctgcgtatccatatcccatgccagaccataggatttattacccatttcgcgatcagactgcgggaaggtgctggtattataatcacggctggagccggtatattttaaggttaaatcgtgggtaaagcggtcgctggcaaaccaggtaaatttgcttaatgcagtatcgataacgtttttatactgtgcccgaccggcgacaatgccgtcattgctaacataatccgcgcgggtgatatcagactggcggcggcttaaaccggcggtaacgccgaagttatcagcgagttcctgattaaagctcaaggtataaaagttctttttaaaatctggggagtaataagtacttccactagagccttgattaaatgcgctcttgttattctcatcgatatggcttgttaaccagtcgctacgcgtagtgcgataacccaatttcaccttgctatcatcagcgttgaagcgtttgatctttgcatcaattaccccgccattgaagcgaccaaattcaaccggcacaaaactgtcataaagcgtcacattgtccagtaagctgacatcaagataatacccctgactcatcccgctaatattggttgcactactggcatcggactcattcgctgggttcaggttattagttgcactaataccgtcaatcaaataggcattctggtaggggctcgcaccgtgaatagagattttctcagggcgaatatctccctggttcaagctggtactttgcgtactatccatgcgtaccgcagggttggttctcagcagatcgctgatattgccattcccggtcggtaaacgctcgatgctttcactggtgtaatgcgtgttgccgtttacgggtacagggacaggagcatagaccgtcatctcttcaaaaaaatgcatgtacatgtttttgtcatcgacggcctgcgccacatcagcgccacataaaatgacgccaggaataagaactcgcttcatttatttatatctccgtacagcagggcttttattgtttttataaaaccgcgctaatgtcacaaatatcatcggccaggttccagacaccgggttgatgtgtaaccataatgacgccgcttgtgggtagtttttcacgcactaaacgcagtaagcggatagcctcttgttcctcaagatgagaggtagtttcgtcaagaaatatccatttcggacgtcgtaaaattaatcgtgccagggcgatacgttgtttttcgccgctggaaagaatatctccccagcgatcgtggtcatgaatacgcgcagccaatttcccaagaccaacctgatgcagtacttcgctcaagcttttatcgtctacgggcaggggaagtgctttacaaataatctctttcagtaagccggttttgattaacggtgtttgactcacataccaactgtcagcaggagaagaaatatcacctttaaaccacggccagcagtgggataatgttttaagcagtgtggtttttcccgcgccagagtagcctttcagtaatagccatttgcctgggctaacatgaaagttcaggttctctaatatgatcttattatcaggcgtacgaatactcgcatcagccacttgtaccgcatgttggcaatttttaggcttattcgtagggcgctgttcagtgagttgatggaactcatacaagcgatcgataaccgcagccagttcagcaagttcgtcatatttataaataaaccagcttaaattgttgcttaccagcataaatgcctggcggcttttcatcagtccgcccagattgatctgcccgctaataaactgcggcaataacagaaagtagggaagaacgctaaggctgcggctataaatattctgccagtaatcaagccaccgctgacgattcattaaacgatgccagttctctttaatggtatgaaaattgtcgctcaactcctggcgttgtagagactcagcattgcttagcgcaatcagttctgcctgcttattatgctgcacaagatttgttcgaaatgtcgcttcgctacgttgtttttccacattaagcggacgaatacgtttacccaccttatgggtaaataaagttccaccgatcacaatgagcacgacggtatagaccatatacccctggatattccattctgttccaccaacagtgaaactgagcgtacccgcgctttcccaaagaataacggtaaaggtgatcagcatgctaagactctggatgaagccaaaactaagactgagcgttttgctgatcagtaagagaatgtcttcagcgatacgttggtcagggttatctgtatttttatgctcgccgtagatctgcgtgaagtagtagtttttatctgcaaaccaccgattaaggtagtaatctgttaaccattcgcgccagcgaatagtcagtagtttaattaaccatgttttgtttacggatattaatacaaagatccccagcagggcagggaaccaaaggacaagctgccaaagcttatcggtttctttctggcttagcgcattgaaaaaatcattattccagtcgtttaaccagacctgaattttaaccacgccaaggatcatggcgaggataataatgattaacaacacactagttttattattcttacgcagccaaaagggcttcaacagacagagatactttgctatcaacatacgaagcgtaatgggaatggttatcattagcgaaaattgattgtgccatccaatgattatctatggcaatgatttactgatgaaatttatttaagtatcatttaacaatatgaaatataaaggaatatttcattttcagtggttatggttatgctattgataatcaaggatattgctaatgccctgatgcataccacgtaagccaggattttcgcaagggaagatgatgatgacgaaacacccgacaggaatttatgtcgggtgccttgttaaggtcataagaaggaggctaagaatggagttaaaagagagcgttattaattattctccatttgttttgcaacatccataatgtggtaaagcggtactctgttcttagctaactctaccatggcgttcatataaggtaccatggtactaaaaaggattttataaccttcgcaaaaataagaaacagtctcattgtttactttagtaatacgatgcttaggacaaccgccattgcagataggtttatatgcacattgctgacatttcgctggaatccgttttttttgcgctgtcagttgtacactgttcatcgttttgagttcagatttattaatgtttccaattttgtactgtggatagacaaaatggtcgcattcgtaaatgtctccattactttcaacaaccagattatccttgcaggactcctggaaaatacaactggtatgcccattccccaaaaaacggctgacaaagctttcaaactgacggatgaaaatttcacccacatcgtttttaacccattgcataaaaatggtactcataaacttgccataagccgtgggaggcacagaaaaatcaatgatacggaatgtgttctcactatgaccactgaaatcaatattcggcgtcccggtttctagcaattcgataaattgcatatgtttactgccgatagattttaaaaaatgataaacctcaagagggtaatggacattaacgttattaatgacggttaacgtattaaactctacttgataacttttcagacgctcgatggctgctatcacttttgcaaaagtaccgttaccactattactgcgtctgtaacggtcatgtaactcctgggggccatcgatgctgataccaaccagaaattcatgttctttgagaaaggcacaccattcattattcaataaaatgccattcgtttgtaatgcattaaaaatacgtttttggcctgcatagcgttgttgatagtgaataactttacggaaaaaatccaggccagccagagtgggttcaccgccttgccaggtaaaatagacctgattgccagacgctgcgatatattgtttgatgaactctttcagagtgctgtcatccatccatttttcatgagtaaactggctctctttttcaaggtaaaaacagtaatcacatttgagattacattgaaaactggagggcttggctgtaacgtgcatcgctatctcgctcaataaggcggcggaaaaatccgccgcatgaaggtttagttatttcgcttcgcttagtgctttcttgatattgttaaacttctcctgatttacctcgctaagcggtggctggctgctgtcgataaactctcttaccacgccttgcatctctttaacgacctgcggattggcggcggcaaggttatctttttgctgtagatccgtcagtttgtagagacctaactgattgttttctactgtatagacaaggctataatcgttatttctcaccgtataagagaattggcttaagtcctcagtgttggggttatgcgggtaatcgtcactctgatggcgaacaaatttgtggtaattatcccagaatggaatattttcctcgtcaaaccagtgagaataagaggttatccaggtcagatttttatgtggctcgccttgtttcttatcttgcaaccagggcagcaaggaaacgccatccagcttaaggtcttttggaatgctgatatcggctgcatcaagagctgtcgggtagaaatccattgcggaaatcagcttgtcataattaccgggttgaagttttcctttccaccacataaacattggggtgtgagtaccgccaggataggtctgactcttatagcctttttgcgccccgttcagcggcagaggaccatcgataaccgcaccattatcggaggtaaagagaataattgtattgtcatactgtccgtttttcttcagttgttcgagaatgcgttttacaccctgatcaacagaataaacggaagcgtagtagttatctgctgtttgactaccggtattaaattgcttctgatattgatccggtgcaggattatcatttggcaggtgcggagcattataagccaggtaaagcataaaaggctggtcaagtgttttggcacgatcaacaacgccaattgcctcatcggttaactgatcgctgatataaccttttgcggggacacgttcacgatttttgaacagactaggggagttgtaatatgccgttcctgcagcgtggaatcccataaagtaatcaaagccacggttttgaggttgccattcttccgcagaaaatgtggtgaagttgtcatgatagtcacgcgtttgtttatcttccggtaccggcacattactgattttactcaagtgccatttacctactgctgcagtgtaataaccatgattctggaataattcaggcaagaaagtttctgttagcggaataccatcctgagcatcggtattggaatagacaccaaagcgggcgggagctcgaccggtcattattgcggcgcgggaggggccggaaacaccgtgtgccacatagccgttagtaaaacgtacgccttcatccattaaactaaggagcgtcggcgtacttttttgtgcagcttcaatggctttatctatccctattttgtaggtatcgacaacttcacgattttccattgtttttgggtcaaaagatcccttatcaaaaggaagttgtccataaccaagatcatccatggtcagtacgataatatttggctttcctttggtactgtattctgtcggcgtaaagtcactgaaagcaacgtttgttttggttgctttcagctttacatcatctgccgcatgagcagcaaatgcagccataccagatgccagtatcaaagatatgctggtacttacgacacttttctttaatgcagacttcataaatgttcctcttcttattgtacttaattccaaagtaattttacgaagagaaataagtggatgtaagtgaagttagtcacataaagagatagcagatttagctaaaaaaagggaaaaaacagtccataaagcgttgacattactttctgttctattaagtaatttctcgccgataaacaactaatttattgatatttaataaattattgcattttactgacaaaatgcagaattgagatcataaataatcatgcaacaggttatgcaagtgcataaatatgtgatggatgtcacttatttatttcaataaatatatcgcctaaaaacaacgcggggcagggaatggctgccccatttaattcttacgcagcgtgtgtggttgactactcgttagcaaataatcaaatagctaaagcattcatcgtgttgcccgtattcatacccgtgtgactttgacaacggtactccttagaaactctcttcggactgttgccgaaatgtttgcggaacgcataaataaaataagatgtactggcataaccacattgttcggcaattttattgacactaccttctacgcgtatcaaattttttgcgtgctgcattcttgcatctaaaagaatctgactgaatgtcgtttgctcttgcttaagttttttcttcaacaggctttcactgatgtacaggcagtcacaaatatctttcagcttccatgggtgcgccggcttcatgttgacaatatttctcactttcccagaaacggatagcacaccgttagttaatagtgtaatgaaacctttgcatgcggcaaaaatagacaggcaagaaaaaagcaaaagttcactaaaattatgatgattgcgttcttcgctgttgagataagcaatcatttcattaagcaatccagtcggtacattactagcacgtaaaaacttcgcaggaacaggcaccgtcactgtctggatgttagtgcattgtagatattttttaatggtattttcagtaaatccgatctctttaaaatgccgctcataaggttcaaaatgcgtacgaacagcgttatctaccatcaggatctcgccgtcagagaaggcgtaatctttatctaaaatgttagcgttgaaggcatgatgaataaatataacagaacaaacgaggctcattttatctccttaaaacaataaagtttttatcgatacttttttaacatttcatatttataatttgctgtttgttttcagccttgcaaactattgataatgaaatgtgtaagatctcttgcaatgcgacccatttctgaaatactcagctgatcaattgccgaaaaaatggctatcaacgtaagtgtcagtaataagacaaccacaattgcagacatgatttctttatagttgtctctttgcgtgattttgtttttcactgtggtcgcatgcatttcaaatatgtttatttagcggataacgttaaaaatcgttaatcagtatgcttaatataacaggctggagaaaagaggaaataggactggtgcttcagtactgagcggagtttcttacagctgtaggcagaagtttatatcttatagtatgtagtttaatttaatccatgtgagcaaattgcgaaataatagtcaatgaggaattcttctgctgtgcggatgacagcagaagaaatgagaagaggcattaattacttggttctaattcaaccggaatacttttatagccaggaatgccacttaatggatcgtggttatcaagtgttagcatgtgattgctttctggaaaataggtcaccagactgcggtcagccatagggtaaatgaccacttttaatctatccatgcggcgactgctgcgcttaccgtctggcgtaagcgcaataagattaactctttcgccgttttttacacggcaaattttagcttgtttagcactcataaagaccacatctcgttgaccgaatacccctcgatagcgatcatccataccataaatcgtcgtgttgtactgatcgtggctgcgtactgtcgccatgaccagcttactgttaaacgcactagagggatcttctaacagccctttgctggtaatgaaattagccttaccactcggcgtcatccagcgcctttcagcagctgcatttatcaggtgaaaaccaccgggatgacggatgcgctggttatagtcggcgaactctggcagcacagcttcaatgtcattgcgaatgcgatcataatcttccaccagatactcccaggctaccacgctctggggtagtgctgcctgcgcgattcccgcgaccactgcacactcacttttcagcattacaccggcgggttttaacacgccacggctggcatgaatcatgctcatactatcctcaacggttaccgcctgcgcaccgtttttttgcatgtcaatctcgctacgtcccaggaccggcagaatatagctatgccgtgcggtcaacagatgagagcggttaagcttagtggctacgtgtaccgccaaatctaattgcgttaacggtacagcgctcgcttcccgatctggcattgccagcgcaaaattgccccccatgcagatcaatgctcgagcctgccccgtacatattgcttgcatgctggcaattgcagcatgtccaggtgcatgaggtggggtgaagccatagcgctcacccagacgagccagaaactctgcagacggtttctcggtgataccgacggttcggtcgccctgtacattagagtgtccacgtagtgggcagatacccgcaccaggcttgccaatgttacctttcatcaacagcagattgaccagttgctgtacgttctgggtaccatgttcgtgctgagtgatccccattccgtaacagataatggtgcgttcggcagcggcatatgcgtcagccagttcggcgatttgtgtctgacttagtccagaaatacgttcgatatctttccactcggaattgagaacgtcacggcgtagctcgtcaaagccgacggtatgcgtttgaataaactcgtcatcaagcaaactaggccgacctgcggcgcttgcagcatcatcgcgctcaattaacaggcgcatcatccccttgagcaacgccatatcgccaccaatgcgcacgttatagtaggcactggccaactgagtctcagagttcgtcagcatttcaaacgggttttgcggtgcggtaaatcgctccaggccacgttcctgtagaggattgatggcgatcattttcgctccccgtttcactaaagcgcgcaagctagtcagcatgcgagggtggtttgtaccagggttatgcccaatgcaaatgactaaatcgcacttctcaaagtcttccagcaacacggtccctttacctacaccgatactcgctgccaaacccacgcttgtcggttcatggcacatgttggagcagtcgggaaagttattgctcccgtattcacgggcaaaaagctgataaagaaaggcagcttcattggaagtgcggccgctagtatagaattcaacctgattgggatcactatagctttgaaggcgtgcgccaatttcgtcgaaagcttgttgccagcttaatggcttgtaacagtcgctgacggcatcatatttcaaaggctgagtgagtcgccccgcagcctcaagctcgtggtctccccaggtaagtaaactttgaaccgtattctcagcaaagaaagaggcgtttacctgcttatccgtgacttcccaggcgattgcttttgcgccgttttcacaaatgtcgaaactcgcactgtgcttaggatctggccatgcacaacccggacagtcaaagccctctggcttattcatgtcaaacatggcaataacatcctggcgtatatccatctgcttacgtactgcattcgctacggatttaacagcaccccaaccacctgcagcaccctggtaggattcaatttttttcttcatctacttatcctgtgtggaaatgaattattaggatttgtaatagcgatgatgcacagtacatacaaagggattatcgccaacatggatatataagagtaggggactactctctttctatttttaatctattatcgttaaacaatagattaaatacgataagttaagcatcatctctcatagtgtttaaattaacatatttttcaatataaaaaataagactctggcttcaattgtgcgcggattttcttacaggtgtaggctaatagccttcacaaaataattatccgcgcaattttcgtgaatggagcgcatagactaaggtcaaaatcacaattattcatagataaaagtgacaccaatgacactctggacggttccggcactaaccttgtttcctgtttgtccataggttgcgcttaaacccagaggtactttgcttttatttactgtccccagggagacattttctcccgtagccagtatttttccattacgcattagagtgacacccactccgcttgcttttgttgcatcaggtgctgtgttagcaaacacttgtcggctactgtcagtggtggcaccgctaagataaaaactgagcttttgttcgctactgcaatatacgccaaggggtatttctgcgcttccaggaaagtccgggagatccacggtgacatttcgactatcaacggtgcagccgcctgttggcataacaacattgttattactaataatattccacgtaaaattacgcggatttccgcttcctaatgttgcaattttatacatatgaatacgggcaatgacttcccccgcttttatgacaactccaccggccgccccaactggggtaatatagagttttaacggtaatggcatcggtgtcttatcaccaatatccaatacgttggtatttgtcgtcaacgggaaggggtaggtcacattattccagtacaggcttcctttataactctgtagggagcctgcgaaagcactgccttgtaccaggtttatatgatcagtgtcgtaccagccgccgtaatcattccagcaacttatatgctgagacaagtctacaaccagattctggcccggctgtattacagggtcgagattaacataaacagaggttgtacctgctccaatactactcccgccatcgacattacaactgaaggcaaaaactttgcctgccattaatagaagataaataccgaacaggacctttatactgattgttttacccatgatatatcctaaggttaaaaattgatttaaaaagaaggctaagaaaatcgaatcgacgttattgccaggtgtagatcacattgattagcgcctcgatcgttccctggcttgcgtttccattcaccgtgatagctcttgccttaagtggaaactgtgcattacgagtgatctcatcaacaataaccgttttgctatcgccattttttaacgcagcatcctggtcatccctcagctctatctgaatattttcggcagtaccttcatttttgtaataacccgtattgtcagtactacctgtcacgattgccgtcactgcacttgtttcaaccggacaatcggttaaactcaaagtaatattgtgccagccagatgcagaaccaggttgttgcagattgcgcgtataaagatccccgagattaacgttagcttctttggtttgaatagtgcagggtttagcgactacccgaccattaacagtgatagtgacatcggcggcctggagagttgctgtgaataacgcgcaaaacgtagctaacaggaacctcttgtgaagtcttttcatatctgactctgattattgaaattcaagggtaaaggttgcgctagccctcaccagtcccggattgacggacttctgagtactcttcagacgagcggagtaaggcaaaatattgttctgttctggtaccagtgggatccactgcatcccggcatgaagatcattcagtttcaccggacgcatatttgcgtccaatatttctatacccaaaccggaggccgtattgcttccttcatccagtttcaacaaagtattattttctgcatcctcaataccgttaaatgcaacccgaacccccgttgtccctttgctgcattcacttaacgtaatctgaaaagggacggctggacttgtgctaccggtcgttggaaattgtctggcactgtttttttggagatctacggtaaaattaaggctatcgctactgactgtgcagccataatcgaggacgcgcccgctaattttaataacgctatctgcggataaagcagaataggtggttaaccccagacataaaccgaggaaaataatgttattgtatttcataatctattgttccttagcgacagattgctgtctgctggttcagtaaggtaccaggagaaacttcaggaagcttgtactcgacaatacagttactgtttttatctttgccccaactaacctgtaattgcccactctgtggaagtccagtcagataaacctgaccattttccgcgacaatgctgccatttttattctctccgtgtgtgacaattgcaccgaatggaacgctcttattaccgtacttcaacgtcattaatactttcccgccgatttgtgcattaaatgttgctctggcaatagcaccgtgagttgggatgacagtgaccacggtttcatccagttcaacattatctgcaagggaattcgcgttaagagcaacacggttttctctatattctgtcgcaaatggtaatatggcatagccacgccagtcggtatgaattccggtctggttctctattttgacattatcagcaccaggagccttaaccagaaccattgtgtcgcccagcggctgtccaaaggtgatgccatcagcatgagcaataatcccaccactcattccgtaataaatctggctgctgtcaccactccgactgtaaccgacattagtattaccataagctccacgataattaagagaactgtaaccactggtgccagagcttgtattacctccgtgggtgttaccgacctgaacgctataattcaggttattatccggcagcagagtgccataaaccccgcttagattggtcatgccgcctttcaaatcgttactcatactgtaactggcgttactattacgaaatgcgctctgactgtctgtacgcatccaatgactgaagggaacattaagcgtaaaagcgagtaaatgatcccgatcgttttgccatatattattggaatagctgtaattcaggctagtcgtaatatcaccaaacggcacatttaatccaaaacttatttgctggtcgctgcgactcgtgttccagtaactttggcgactggcactgaaaaatgtcgtaccgtaatttccaagctgctgagagatgcttatttgttcctgaccacgcttactgtagaacagattaaaataatcaataaattgtgtctgctcattggtgtctccggtaggaggcttgacggtgtaaccactcattcgactgtaggcactgtcggataagttataaaaaccttgcgtagaatagcgatatcctgcgacctggatattggttccacaacaagtttattgctgcacttgttgaagagagtatttgcaaaaacattttatgtcgctaaataacatgacgatttcattatgcatgttatttataaaccgtgactaaacagaatattattgcgaacaagggaagtgtcaggaaaggtcaagagctaccaatggttaatatggctataaatcattagctatggttaatgtttgcttgctgaaactaacaccgaattgctctaaacagataagtgcagggtttattaaagctgtccgacagactttcttaacctggtaatatctctcttgggtgactctccaaacatccgcgaatattcccgacactaatgggatagctttcgtaaccgacagcataggctgctgtggtgacatcgtaatgttcattcagcatctgtcgcctgacttcattgagacgtagccatttctgataccggagtggactcattcccgcttgatccgtccttaaataagtaacagcaccctctggtgttttcgtatgcagtgtctatgcgacagacactgcgctcttagcatggggcagggaataaccaggctatttctccatgcacaggccaattatgaaagaggagaggcttaagttcttgaaccctgaacgaataacgactaccagaaaagcacttcgcatcactcagacatgatttaacataatatacattatgcgcaccaatataaaccaaggaagaatccagtcgttggcggtcatgattgtcatgctcattaacaatgaccaaaccccatatctcacttactaccgtattctcggcttaaccgtccatgcaacctcaacacattgctttcaactgccgtcaccacgttctccggaaaatctgtcggtaaactagtcttcacgttatccagtgctgctggaatcattctggcaaagtcactcaggatttcatgcatctgcacttccgggaatctcagcacctttgctgtcgccaaaaaatgtcgcggataaattttatcgattgccgtttttttgcctttggatgcgttaagccccattgccagtttgagatcgctgatgtgtattcccgtaccgccaaggaccggaaatgcactaatgatgtcgtaaaatggcgtgagtcgataactgccgccagcctgaataaatacggagaagttttttgcatgaccgtccgttgcgccaatcaaccactggaagacctggaatttcataaaatcatagcgatctttcagcgcctcgctggaccccatcaaaaaagccatgatccgcgcgatgcctgggcctccatcactttcatatttcacgctactaggtaaaccgaatgtctgacacatatcctcctgtggcaagcgaagtaaaaccgttcgctcagcattccaacgcctgtcaaaacgttcgaccgctaacgcgcgcacatttcccgctttaatgatttctgcgtccggaacattcaacccaagttctttcgccagcagcagacagtaatactcattatcaacgctttggctgagatcgagcgtcgcattgggctgcctgatttcgccaatcggtaatttaatgatgtgcgtcgtcggcgttattcctttcggaatgcaccagtcattgcctattctgagcagtgctgtcttctcctgtgcgccagcaacgctgatgcgaaagtcattttcttctctaatcatgcctagcgggatatctgctttataagccgttaatacttcttcaagtctggcttcagtaagcttttcccatgccattatcggatgcgttacggtttcgtcttcgggtattaacgtcacggcaccaacgctgtctcgccctatttcactcaataaatcaaacggttgtctggatttggcatgataacgtttaacgatccggtcacgtacaatcgggctatcgggtaacaggttatcgaagaagttaaatacggcatcagaggtgatattccccctctgcaatggcaggctaagactcaacggtctggcataacggcttgctaaccactccggtgcatacttaaaggtgtgcgcgccgttggctaacttcgttaactcgcctacccgctggttgttcatccaagtgacaagtttaggcattaccactccagattttgctgttctgtactttctgggctggcatttttcgcgtcgcatagcgtcatactgagttcaaggctctgtaaaatcttaaaaaatgtcgtgagcgtggtattgtcagggttgttttcgaaattggaaatcgtcgcctgcttaataccaatttttttcgccagctcgctctgcgtccagccattttgctggcgaaccagtttcattgcattcgccaattgcgttgggctatagatcttctgaaagctcatcatgtcatacgtccacagcaagtttatccgcttaaggggatattataagttttatcctttagtgaggataagtcaatctggaaacacatcttatccgctctacgggataaacgctgcgatatccgcgatcgcggataaaaaggaggatttaaataaggcgttgatgcgccgtttgaagtcggcaatattaagccgcatgccatctcgacatgcggcttatacggtttaccagctatatttcactcccagcatgccctgagtatcgctatagcctttatcacctagttgcacaccgacattcccccacaggctaaggttgttatttactttcgcctcaaccccggtacgtacttcaccgagattacgcgcaccttcacggcctacggtttgaccattcatcttcacggcgtagactttgctattgttgatccagttcgcttcaatgtaaggctggaactcacgctgtttaccatcgtcacgctggtgatggctgttcaggtaggttttcaccccaagtcgcgtttgcacatttccgtcgccttccgtttcaatgcgcgttccgtctttccgggtatggtcggaatctttcacacccatccaggtgatttgcgcctgtggctggacgtaccaggtattcagcgtcccttcgctgccgctaaatgttcccgcttcaaaggtatacccaccctcaacagaggccgtcacaccgcgagaatcatagtcgtcagcagaacggttatcggaactgacgctgttatcaaaccagttatacagcgcccagctgtcaacataagcgccggtcttattcgcatcgttctgataccaggtcgcgtacagcccagcgctgtaaccgctgatgcgcccatcgcttttataacccacacgattactctgagtattactgtgctgattggcgtagcctgccatcacgccaagatgccagcgatcctgcgcgttgctactccactgcgccaaatcgccgcctagctgcaatacatagcggttagcctgagtatttagctgaccgtcaccggccctactacgttcgtgccctccgacatgacgcatccacatactgcttgcgctcccctgagaatgcagactatctgtatactgcggctcacccagacggtcgtgtaaacgatggctaaacaggctgttggctgcggcaatgttgctgatatagcttccggcctccgggcgataaacacttgggccttccggatccacaacagggggattattgatgggatcgggtgtatccgctggcgttacgccgtcccatttactggtcagataccagtttttctcgtcattccccttccctttagccagcgtgtagacgtaagccccagcttcgacagttccggtggtcagcgcgaagttacctgcagaattaccgccaacctcaatgagttcaataccgttgaccgtttgtgcaccgacgccgccaatgttatcaacccgaacgcgagtgttcccttgggtatcgcctttcacgttcatcttatcggtggggctattatcgccgcccagcgtcgcgttgaacgtcatcaggccattgtttccggtatagttgccgttaacggtcagtacattccccggtttccccccttcgctattcatttgaaccgtgccgccattctccaggttgccgccgatagtggttttagcgacacgcagtgccccccccaggcataacgttcatatcacctgcagtggtgacatttccgctcatcacaccgctgttatggatattaatgtgttgacttgccatattaatggcagagtcggaaccgaaagcaatttccccccccacgatatccgtcgtaccctgatatgccgcggaatcgttgttaagagtcaggatcccggtacccagttttgtcacatcaccgctaccgctgatactgtgcgtcatcgcccagctacgctcagtggagatggtgagcaggccattattgataacggaagcatcacccaggtttttctgctcgttgacgctgagcgcgctgcctgtatcaatgttgaattgccccacaaagcggctattatcgccatccaactctacatctgtcctggcggttgcgctcacgatacccttcccgcttatgctattacgcagttcgccagtcacgttttttagcgttaacagaccgtcattggcaatatttcctctgcctaacccctgagtattatcgaggctgacttccgcatttgggctaatgctggttaacgcattgtagcgtgcattaagcccctcgatagccagcgttccccctgtaacattcaggtttccgccacctgtcagttcaccctgactgatcccacctttatttaccgtcagcgccccctctttgaacaaaacagtgctacccatctgcccggtgaatgtctctaccgtctgcgtgcttccattaagatcgacgatggccgcgttgctgatgttcagttcccgggtgttgccaagtgcaccatccgcatcggtacgtaatgtccccatctgaacgtaggttgccccctgatagtcgttctgaccgttggaaaggctaacctgtcgcaccgtattgattgccagatccccttcaccaccgatttttgcgctcatatcggccgttgcgccataggctccgccatgttcggctaacgtcagcttttgcccaccatggatgttcagcgctttcagcccatagttaacgtacaaaccattacctggtgcggtcgtgaggcggaatccataatcaccctcggcgaccaccgttccgttttgcgcaatgtgtaacgttttgtccgcttccacctcgtcgccctgtaaatcacgtaacgttaaactgccaccgctcccaataaccgtttgcgccttcaccagttgaacgccgacatggctatcgtcgtgttccagcaaattgagcgtcgtcagagggttattcgccatgggatcattccacggtttaggcacgtcgataagcacgtcgcccgtcccgtttacctgatagttacggcctttccaggtgtagtcacccgcgccgacaaccagcgtatcgacgctgatatatccctccgcgagcgtcgcagcaggaatatccgtatcgaaaatgatggtacctccattcatggccagtccaccaatggattgctctccaacttttacgcttgtggtattttcactgtcagactgcaacatcgcgtgagtaagcgcagcggtgttgtcgcgttccagagtgaaggtactgtctttcagttgggcaacaccggcgaattcagtccctgttgcatgggtaaagccaaacatcttgtcggaggaactcagctgcactcgcatcaagccatcgcctttgagcgcattggtcagcgtgtaatctcctgcactgttcgtacttgcgagaatgtcgagcgtaccggggtttgcaatggttacttcactgctccccatgcccgttaccccatctgccgtatgagacgcaatggtcaggaggccgtcattgaccagcgttttaccgctataagtattccctgcattgaacaccgtatggcctgcatcatggatcacttttccgtctttatcgtcacctgtaatcagcatatcgacctggtagccggcatcactgttattggtatgattaaagacaaaaacgccttcgccaagaccaaactccactttcgtcgcattggtgataaatccggcatctgccgccgcctcaccgtgagcagcaccaatgtttagcgttcctacagcaggctcaaaaacacctaagtaaacttctccaccttcgacattcagcgtaccgttattcgtcagggttaacgtacccgtaccagatgtccctacgtacatattgaatgtttcaagaagagagttctgcccatccaccctcacgtcgcccttacttttgtcattgagagctatctgtgtatcacgcgctttaactatacctccggtggtaatattcagttcacccgtgcctaatacaccgacctgtagcaattgtgcgttagtagaacttgtctttaaattccagagactgtccgtactaatattaactatccccttaccggaggcatttcctccgataaatccatagcccgtactattaagggtggcaccattactgacatttacgataccgctaccaaaattaccgacattgatacccacagtatcgaagctacttgtcgcatccatcaggttcagtgtgccgataccgcttgctttatcgcccaaaaaagtaatattttggcttacgaacttaccgccatcgctaatattgaggtttccgacgcccgcaacaccaatggtggtatagacattcttattgacctcccacattccccccgtggtgatgctgacattcccgacgccggtttctccataaccgagactacttcctccgttgctgacaacaagcccctgattactgatattcatttcgccgtggccgtcataaccaagattagttccgagattagtgataacggagttcttatccttaacagtaatgttgcctgtgcctgtttctttcatccccgcagtgataattccgctatctactttgccttcactgctgacattaagttcaccgtcgccagcatcaccgatatagatatagcggaaagcttcgcccgttccgaggaaattccaatgccctttatcggtcacgttgacgacaccgtgggaaccgtcctgaacgcccaccaaactatattctttgttattaatcagtccattattggaaatattgactgtgccattaccgaaatatccattatagagtctgcgtaccgtgatgacagagtcttgatcctgcacattcagggttccgataccggtggcattgccaccgataatcgtattttcagccgtaaccaaccccccctcgcgaatagtcgcctccccagttccttgattaccaatttgaaattcaatactggaatcattattttttattagccactcgccacccttttcaacgacaacctggccattactgcccgcctgatagcctaaaatggcgacgatactactcgtgacgtaacccttatccgtaatatttaaactacctgtgccatagctacctatttcgaataattcggtcgtcagaacagagtcctctccctcaacattgaccgtcccgacgcctcctgtgctagaacctaatcttaaatagcctccatcgacgtgacccttctgtttaatattcagcgtccccgttccggattgacccacatttaaaggccttgcattatttccgctatcatacaatcgccaggtgccacccaaaacattaacggtgccctcactgtcctcattagcgccaatgacgctggtagtaatagtggttaaggaggcattaccgccagccaaaatattaagcactccagtgccataccagccaaccaggtaggcatcataagcaacatcagtatcaatattggtaatctgatcattatcaacttccagacttgcaccagacgcactaccgcttagtgccagcaaaacacccagcgtcaatctactgaatttcgttgtcagtccagaggatttacgcaaattaaccgtgcttgttttacctgccctgcgagttaattcgctgcaggcctgaaatacctgtagagtgcaattccatatcacgcgatagattctattcatataaacgctccatatacaaacaatacagccacgaaagagatgagtcgtcagacattaaaaatgaaacttattaaattgtcagaggtctgtattgagtgttagttggaggtgggaaggtgtcaatttggctaatttgctaatgctttcgaattgatagattaaaaattgcatagttcttattttatttaaatatgaactatgagttattgttgcttaataagaaaactgtttctttcaataggaaaattatcatcatcatatttaacaaagaatagcactaattgctaaaaatcgaagtttattaaaccccttttgcatccattagtgtctttaggaatattcgctataaaataagggttgtgcttaatgctttaagaaaaatagcaattttcccttgaatatcgtactggtgatggaacgatgaatctgcaagctggcttttaacaagccagctctaaaagaagggaaataagaataactatactcaaaaactaacagccacggtcatcatgatgtggctgtcaatgaaattataacccaggcgctttccataagctcgtcgtcagtccatgatcaaccagccccagctgatcctgataaactgcctgccacttatcgcgactatcctgataaagttcatgcttttccgggtctggtgtgtgcgtccgttcccagcgaaccaggcgttctccggtttctgccatactactaaaaattccggcaccgacgccagctgcaatggcacatcctaatgcagtggcttctttgaccaccggaatattgacgggtaatccgctgacatcagcgagaatttgactccataatttccctttactacctccgcctgcaaagactaagctactaggatgaatattgctgaaatcagcaatttgctgcaagttacacgcacttacaatcgccgcattttcttccagcgcacggaacaatgtcgctttgttacatttatccgggtcaatggacaagttaataaaggaaggcgcagcgtgataccaggttttaaagcgcattctgtcggagaagatcggcattacgccccagctcccaggcggcacccgactggccatctcttccagcagcgtataggtgtcgatgcctaaacgttcggcaatcagtttttcttcggcacagaaagcatcgcggaaccagcgcatggtgagtccggtaaaaaagcttatagattcagcttgtaccatgccaggaataacatgaggattaacgcgcacgttcatttctgggtctgtcaccggcgcggctaaatttacaacttgctgccagaatgtgccgccaagaaccgcggtttgtgccggacgcacaacgcctaacccaaggcaaccaagctgcacgtcgcctcctccaacgaccaccggagtgcccgccttcagaccgcagagttccgccgcttgactacttaccacgcccagcaatgtgccggtttctttgacaggagaaagaatatcggcacgtaggccagccatatccagcaatgcaggtttccagtcacgggtggttagatcaagaagtcccgtggtgccagcgttagagggatccaccgccagttcgccgctgagcatataggccagccagtcgctgatcatggtgatggtacttgcctgacggtaaatatcggaacgatggtgcgccagccaaagtaatctggggatggcacttaaagccagtgtttgtccggtcgcgcgataaacttcgttttcaaaggtattgttgtgcagttctttaagttcgctaacttcgcgtgccgctctggcatccacattggcgcaggcccagatcggggctccttcattattatataaaacaatgccttcacgcatgctacatgcgctaacggcagcgatatactccggggctatgccggcgttgtgcagcgcctggcgcatacactcacacgccagttgccagtttttgttgagatcaaattccatagaaccaggaacgtccggtactgccagatgccgccactccgcctgtcccactgctatttgattgccttccaggtcgaatatcacagcccgaatacttccggtgcctgcatccagcgccatcaggtagtacttactttcactaagggtaaagagtcgagccattagattatcctcggcttatgcgttctgtctgttcctctatacgttctccatcattcccggtaataaggtcatgcaaatttaactacgtaaaatcgccgctgctgtgtcctgatcggtaaccagtgcgttgatataaccgcctttcattgcagcggcaattgcttcggctttattttctccccctgccacgccaacccggacgggtatggtcttcagcgcgcttaaaggtaagccaatcagttcgttatgtattttgatattcgtgacaacgtcaccttttgcatcaaaaaagtagcctaaaatgtcgccaaccgccccttttcggccaatcattaactgttcgccctggctgatataaccggagcgaatgattgtcgcatcgtcctgttgactcacagcaccaatgccgacaatcgccacatccgctgcttgcgcggctaacagaacatctttgacgcaattttcattttttagcgtacgggcaatgtcagcggaggatgcccgcaacggagccggaataatattcacactgcacgccgcgttaagctgcccgattcccgtcatataagaaccgacgccaccggagagcgtgaccaggcgaatttgctgactgctaataaaaccacttaagcgttgcagcgtattcatggttgcctcgccaaaaccaatcgccagcatctgttgtggttgaagtaaactcatcaacatatgcgccgcgcctatccccagtcgcccaccgacatcagcatccgcaagcccagggatcacccggacatgttgcaggctaaactgacgacgtaattgagtttcatattccagacagccttcaaagcgagaattaatctgtacgcgaataatgccggactgatgccctttctccagcaatcggctcactttcaaacgtgtcaggccgagacgatcgctgatctcgctctgggtcagcccgtcgtgatagtaaaaccacgcgatccgcgcgacctgttcttcttcacacattccctgttcactaattgcgctatcgttgattgtcataattcattcttcactttgaacatatttaaatctttaatgcaattgttcagttcttgctcatttatatctgtgatggcaaccacagtttgactctacgagcatgaacaaacgcaaccgtgaaaatcaaaatagcataaattgtgatctattcgtcggaaatatgtgcaatgtccacctaaggttatgaacaaattaaaagcagaaatacatttgttcaaaactcacctgcaaaactgaacgggggaaatatgcaaacgagtgatacccgcgcgttaccgctactttgcgcccgcagcgtttataaacagtatagtggggtcaatgtcctgaaaggcatcgattttacgttgcatcagggggaggtccacgccctgctcggcggcaatggtgccggtaaaagcacgttaatgaagattattgccggtattacccctgctgatagcggtacgctggagattgagggcaacaactacgtcagattaacgccagttcatgctcatcagctgggtatttatctcgttccccaggaaccgctgcttttcccaagcctgagcataaaagaaaacatcctgtttgggctggcaaaaaaacagctctccatgcagaaaatgaagaacttgctggcggcgctgggctgccagtttgatctgcatagtctggcaggaagcctggatgtcgccgatcgccaaatggtggaaatcctccgcgggctgatgcgcgacagccggattctgatcctcgatgaacctaccgccagccttacccctgcggaaaccgaacgcttgtttagtcgcttgcaagagctgcttgctactggcgtgggtattgtttttatcagccataagctgccggaaattcgccagattgccgatcgaattagcgtgatgcgcgacggaaccatcgccttaagcggcaaaaccagcgaactgtctaccgacgacattattcaggccatcaccccagcggtacgggaaaaaagcctctctgccagccaaaaattatggctggagttacctggtaaccgcccacaacatgccgccggaacgccggtgctgacactggaaaatctgaccggcgaaggtttcaggaatgtcagcctgacgctcaatgccggagaaattctgggcctggctgggctggtgggggccggacgcacagaactggccgagacgctctatggtctgcgtactttgcgtggcggacgcattatgctgaatggtaaagagatcaataaattatccactggagaacgtttactgcgcggtctggtttatctgccggaagatcgccagagttccggactgaatctcgatgctagcctggcctggaacgtctgcgcccttactcataaccttcgtggattctgggcgaaaaccgcgaaagataatgccaccctggaacgttatcgtcgggcgctgaatattaaattcaaccaaccggaacaagctgcacggacattatccggtggcaaccagcaaaaaatcctcattgccaaatgcttggaagctagcccgcaagtattgattgtcgatgagccgacgcgcggcgtggatgtcagcgcccgtaatgatatctaccagctgttgcgcagcatcgccgcacaaaatgtggctgtgctgcttatctcctccgacctggaagagatcgaactgatggcagatcgtgtgtatgtgatgcatcagggcgaaattacccactctgcactgaccgagcgcgatattaatgtcgagactattatgcgcgttgccttcggcgatagtcagcgtcaggaggcgagttgctgagctaaagtcagcgtcaggaggcgtcatgctgaagtttattcagaacaaccgtgaaatcacggcactgctggcggtggtgctgctgtttgtattacccggttttctcgaccgccagtatttaagtgtgcaaacgctgaccatggtttatagcagcgcgcaaatcctgatcctgctggcaatgggcgcgacgctggtaatgcttacgcgcaatattgatgttagtgtgggtagcattaccggaatgtgcgcggtgctgttggggatgttactgaacgcaggatatagtctacctgttgcttgtgtcgcgactttactgcttggtttgctcgcgggatttttcaacggtgtcctggtcgcgtggctaaagatccctgccattgttgccacccttggcacgttagggttgtacagaggcatcatgttgctgtggactggcggcaaatggattgaagggttacccgccgaactgaaacagctctccgccccgctgctgcttggcgttagtgcaattggttggttgacgataattctggtggcatttatggcctggctgctggcaaagacggcgtttggacgcagtttttatgccacgggcgataatttacagggcgctcgtcaactgggcgttcgtactgaagccattcgcattgtggcatttagcttgaacggctgcatggcggcactggcgggaattgtgtttgctagccagattggttttatccccaaccagaccggtaccgggctggagatgaaagcaattgcagcctgcgtgctgggcggcattagtttgctcggtggttccggtgcgatcattggtgcggtactcggcgcatggttcctgacgcagatcgatagcgtactggtgctgttgcgcattccggcatggtggaatgattttatcgcgggtctggttctgctggcggtgctggtgtttgatggacgcctgcgttgtgcgctggaacgtaatctacggcggcaaaaatatgcccgctttatgacgccaccgccatccgttaaacccgctagcagtggtaaaaaacgggaggccgcataatgcgtattcgctacggttgggaactggctcttgccgcactgctcgttattgagattgtcgcatttggtgcaattaacccgcgaatgttagatctcaatatgttgctgttcagcaccagtgactttatctgcattggcattgtcgccctaccgctaacgatggtgattgtcagtggcgggatcgatattagctttggtagcaccatcggcctctgcgccattgcattgggcgtactgtttcaaagtggtgtgccgatgccgctggcgatactcctgaccttactgctcggcgcattgtgcgggctgatcaacgccggattaattatctataccaaagttaacccgctggtgattacgcttggcacgctgtatctgtttgccggaagcgctctgctgctttccggtatggccggagcgacggggtacgaaggtattggtggattcccgatggcgtttacagatttcgctaacctggatgtgctgggactccccgttccgctgattatcttcctgatatgtctcctcgttttctggctctggctgcataaaacccatgccggacgtaatgtgtttttgattgggcaaagcccgcgcgtggcgctttatagcgcgattccagttaaccgtaccttatgtgcgctctatgccatgacggggctggcgtctgcggtcgccgctgtgctgctggtaagctattttggtagtgcacgttccgatctcggtgcgagctttctgatgcccgccatcaccgccgtggtgcttggcggggccaatatttatggtggttccggttccattatcggcaccgccattgcggttttattagtgggatatttgcaacaaggtttgcaaatggcaggagtgccaaatcaggtgtccagcgccctttccggtgcgctacttatcgtcgttgtcgtaggtcgttccgttagcctgcatcgccagcaaattaaagagtggctggcgcgtcgggccaataacccattgccataaaggatatcttcatgacacttcatcgctttaagaaaatcgccttacttagcgctcttggcattgccgcaatctctatgaatgtgcaggccgcagagcgtattgcatttattcccaaactggttggcgtgggattttttaccagcggtggcaacggcgcacaacaagcgggtaaagagctgggcgttgatgtgacctacgacgggccgacagaacccagtgtttctggtcaggtacagttgattaataacttcgtcaatcaaggttataacgccattatcgtttctgcggttagccctgatggcttgtgtccggcactgaaacgcgccatgcaacgtggtgtgagagtgctgacctgggactctgatactaaaccggagtgccgctcttactacattaatcagggaacgcccgcccagttaggaggtatgttggtggatatggcggcgcgtcaggtgaataaagacaaagccaaagtcgcgtttttctacagtagccccaccgttacggaccaaaaccagtgggtgaaagaagcgaaagcgaaaatcgccaaagagcatccaggctgggaaattgtcactacgcagtttggctataacgatgccactaaaagcttacaaaccgcagaaggaatattaaaagcgtatagcgatctcgacgccattatcgcccccgatgccaacgccctgcccgctgccgcacaagccgcagaaaacttgaaaaatgacaaagtagcgattgtcggattcagtacgccaaatgtgatgcgcccgtatgtagagcgcggcacggtgaaagaatttggcctgtgggatgtggttcagcaaggcaaaattagtgtgtatgtcgcggatgcattattgaaaaaaggaagtatgaaaacgggcgacaagctggatatcaagggcgtaggtcaggttgaagtcagcccaaacagcgttcagggctatgactacgaagcggatggtaatggcatcgtactgttaccggagcgcgtgatattcaacaaagagaatatcggcaaatacgatttctgatgtgcattacttaaccggagtaagttatggcagatttagacgatattaaagatggtaaagattttcgtaccgatcaaccgcaaaaaaatatcccttttaccctgaaaggttgcggtgcgctggattggggaatgcagagtcgcttaagccggatatttaatccgaaaacgggtaaaaccgtgatgctggcttttgaccatggttattttcagggaccgactaccggacttgaacgcattgatataaatatcgccccgctgtttgaacatgccgatgtattaatgtgtacgcgcggcattttgcgcagcgtagttccccctgcgaccaataggccggtggtactgcgggcgagtggtgcgaactctattctggcggaattaagtaatgaagccgtggcgttaagcatggatgacgccgtgcgcctgaacagttgcgcggtggcggcgcaggtttatatcggcagcgaatatgaacatcagagcatcaaaaatattattcagctggttgatgccggaatgaaagtgggaatgccgaccatggccgtgactggcgtgggcaaagatatggtgcgcgatcagcgttatttcagcctcgcgactcgaatcgccgctgaaatgggggcgcaaattatcaaaacctattatgtcgaaaaaggttttgaacggattgttgccggatgtccggtacccattgttattgctggcggtaaaaaattaccggagcgcgaggcgctggaaatgtgctggcaggctatcgatcagggcgcttctggtgtggatatggggcgtaatattttccagtctgaccatccggtggcgatgatgaaagccgtacaggcggtggttcaccataacgaaacggctgatcgggcatatgaactctatctgagtgaaaaacagtaactgcggatctaaggagaagaattatgcacgtcacactggttgaaattaacgttcatgaagacaaggttgacgagtttatcgaagtttttcgccagaaccacctgggctctgtacaggaagaaggcaatttgcgcttcgatgtcttacaggacccggaagtgaatagccgcttttatatctacgaagcctataaagatgaagacgcagtggcgttccataaaaccacgccccactacaaaacctgtgtcgcgaaactggaatctttaatgaccgggccgcgtaaaaaacgtctgttcaatggtttgatgccgtgaggcgaatttatcaattttatctacaattggggtaacgcgctgacgggagtaaaaaaatgtctgactggaacccctctttatatctacacttttccgctgaacgaagccgtccggcggtggagctgcttgccagagtgccgctggaaaatgtcgaatatgttgccgatcttggctgtggcccaggtaacagcaccgcccttctacaacaacgttggcctgcggccaggataacaggcatcgacagctctccggcgatgattgctgaagcgcgcagtgctttgccagactgccagttcgtggaagcagacatccgcaactggcaaccggtacaggcactcgatctgatttttgctaatgccagtctgcaatggctgcccgaccactacgaattgtttcctcatctggtttctttacttaatccgcagggcgtgctggcagtacagatgccagataactggctggagccgacccatgtgctcatgcgcgaagttgcctgggaacaaaactacccggatcgcgggcgtgagccgttggctggcgttcatgcttactacgatattttgagcgaagccggatgtgaggtcgatatctggcgaaccacctactatcaccagatgccgagtcaccaggcgattatcgattgggtgactgccactggattacgtccgtggttacaggatctgaccgagagcgaacagcagctttttcttaagcgctaccatcagatgctggaagagcagtatccactgcaagagaacggacagatactgctggcatttccgcgtctgtttattgttgcccggcgtatggagtaaatatcacgtcagctggtaatgacgatcgggaagaatttttgctggaatttcggcttcatcgttcatctgtaacaggtcaatttcaatagcgttgcagatggcatccagtggtaaatcattgttttcagtaccgaacggatcttccagttcttccgccagacaatccaggctaataaaagtgtaggaaatcagcacagagataaaaggcgtcatgtaatgcaggtccacgaccagcgcgaacggcagcatgatacaaaacagataaacggtacgatgcaaaatcagggtgtaggcaaagggaattggcgtataggcaatgcgctcgcatcctgccaggaccgcactaatatcattaagccgatcgttgaggctaataaacaggatatcactaagctgtccattgcggcgctgaaccgccaaccattctcccattattaacaagatacggttagctggagagttgctagccagtacacgctgaagatcttcagtcttgagataatgagccagcacttccgcctgtggctgtttgcgtaatgtcatgcgtaaacagtgggcgaaagcgatttgcagccgggcaaactcccttacacttgcgctatccggcaatgtcgtttttacctcgcgcagtaagctccgactggcaatcatcaactgcccccaaagttttcgcgcttcaacgtaacgggcgtacccggcattattacgaaaaccaagaaaaatggcgatggcgacaccgagaatgctgaacggtgcgagggtgaatttgatgcccagatgcgtgtaccagggcagcatgaaaataacagcgatagaaaagagaaaattgagtagtaagcggctggatatcttggataatacactgccgtgccagacaaaaatacggcgcagccagtgttgttgtggacgaacaatcatggttatcttcaggcgtggaaaagtcgccctattaaacgtgattacgatcacattctcaagacgctacttacaaattacctacaagcttacaacattagcaggcgctgcatgtggcacctgttaatgataaaggcatataggatgttgtaactaatatggtgaaataagaaacccggtcgaaaccgggttcagaagtaacggtgttattagcacaacggacgtacagcttcgcgcatccctttttcgagaatcgcatccaggtcattagcaacctgctcgaccagaccaggcacttgcgtcaggtcctgctcccagtggtctttttctgccaaaacaatcgctaccagttcctgggtgccgataacacggtcacgatgctggctccagagttgctgataacgttccagccagtgtgcatcgtcctgtaccggatatgtttcgccgttacgctcaccacgatagaacgcaatcaatgccgctaatgcgaaagtaaggcgcgccggaagtgtgccgtttgccttctgccctgccagcagctgtggcaggatgcgggtgcggaacttggtcataccgttgagcgcgatagacagcagctgatgcttaatgtacgggttacggaaacgcccggtgactgcactggcgaaagattccagttcatcacgaggcaaatccagtaccggaataatttcttcgtagatagctttttcaacgaatgcgcaaatttcagcatcgttcatcgcttcacctacggtatccagccctgcctggaacgccaccggcaccagcgcggtgtgcgcaccgttgaggattgccactttgcgttctttgtacggtttaatatcgtcaacaatcagcacgttgagcggatatttgtccagacgcagttcagtcgctaaggatttcggtccctgaatcacaaacaggtaaaagtgttcagcggtgtcgagaaaaccatcgtgataacccagttcttcttccagtttagccacttcatcgcgcggataaccggtaacgatacggtccaccagcgtagaacagaagctgttagcctgatccagccattgaataaatgcttctggcagtgcccactcttgcgcatagcgcagcaccagttcacgcaacgcgtcgccattgtagtcaatcaactcacacggaatgatgatccaacctttatccagcgcaccgttgaaatggctaaagcgttcgaacagcagacgggtcagttttgccggatagcttaccgctggcgcgtcatcgaatttatcgcccgcatggtagctgatacccgcttcggtggtgttagagaaaacaaagcgcatttccgggttgtgcgccagtttcaggaattcatcgtattcactgtagacgctgatttcacgattaacgctgcgaatcagacgcgcgtcgctgaccgcttcccccttctcattcaggccacggataatggtggtgtacagaccatcctgcgtgctcagactcggcgggaaactagtttcaatcggacgaacaacgaccacgccagaattcagatcggtgtgctcattcaggagatcgatttgccagtcaacaaaggcgcgcaggaagttaccttcaccaaactgaatgatacgttctggatactgtgcaccgggaaaatcgcgacgatttagtgttttcacaatgggttcccttctgattagtcatacaacctgtttgaattggtacgacaggttagcaaactttaatacgccgaacccctgttttgatcaactcctgatgattaatgagcagttttatgagaaaagtgtggcgcggatcatggtttaatcgaggaaaaacgccttttcctggatcataaagtggtagaacacattgcattcaaatcgcgcgtaatgaataaagatgtcagacaacttcctcaccgtaacgcatagtgctggtacggttgcgcccatctttcttgctgcgatacagacacgtatcggcttcgaccatcaatttattaaagtcatcggtcagcgttaggtagcttgcgcgaccactaccgacgccaatacttaccgtgagataaagcgttttttgttgccaggtgaatggttgcagttcaacgcctttacggattttttccgccattagcagaccatcgacaggattcacgctcggcactgcaacagcaaattcttcgccgcccattcgcgccaccagccccttatcaccgacaatcttctgaatatgccgggcaaacacgcttaacactttatcgccacattcatgtccatagttatcgttaatgcttttgaaatagtcgatatcaagcagcatgacagtcagatgttgtgtctgtttcaggcttggacttttcagcgcctcataaagaccggaccgactgtaaacctgagtcagaaaatcaaagtcggctcgcagcgcaacttgcttcattaggctattgatcgctgccacgctaaaagaaaccataattgggcatatcgccatcgtggcaataccgagacgtgcggagaacatttgcggaatggagaacgggctaccgacgctgatatcaatcacgctatttgccaccagtacgatttccaccgcaccggtgacaaaggtcaacagacatgttacctgcggcgtatagcgcactgcacaccagattaatgcaggcagcgggaacgccagactccccgctccgccaatgactacgctggcaataacgctcacaataagcgcgatggcgggcatcatctgttctgctttaaagcgcggcagcactccaggaatagccaacgtcagcatacaaggcacgatcaacacgcccgtactgaattgctcactgaaccagtccgcaagcaaaggccagaaatccagactatcaatactgaccgaaccaagatagcatgttcgctgacagcggcggcaaataaaggtaccctgggaatgctattttgtcgttttccgcaattctcatggctgattcatctgtacaaccagccagtgatagattaccgccacgatataacgttgttgttcttcgcttaagctaacaccctgcggaatgttatgccacttagccagacaaccgcgacagcaggtcgcggtggcgtgctgagcgataaacaccggatgcccgcgcatgggggtttgcttaccgtcattagccggtaatgccggagcaagacgtttagcgacaaaatccgccgcatgttgttcgatgactggcgcgcctttctccaggcaatactgacgctctttcatgcccagacgaaagcgagagcgaaatttactacgggataaacgcgcgaagagtggatcgagagactgcattaataaacgctacgccctaactgtttcgtcaattgttcaagaacggcaatacccgcaaggctgttacctgcatcatccagttccggactccagacagcgatggccatttcatgcggaacaatcgccacaataccgccaccaacgccagatttcgccggtagccccacccgccaggcaaactcccccgcgttctggtacataccactggtcgccatcagcgcgttaatttgccgcgcctgcattggcgtcaccactggttcatcaatatgaatagctttcccctgattagccagaaagacaaacgtccgggccagctctacacagctcattttcagagcgcagtaatgaaagtagttttgcagaacggttgtcacgtcatgatggaaattgccaaagctcttcatcagccaggcgatagccgcatttcgcgcggaatgttcaaattcggaacgcgctaccaccgtatcgtaggaaatatcagacacaccgcttaagccgcgcacgacttccagcatacgttgccgtggtgcgcttaatcgcccttgcaacatatcgcagaccaccagcgcaccggcattaatgaacggattacgcggtataccctgctccatttccagttgcactaaggaattgaacggacttccagacggatctttgccgacgcgttgccagatttcctcttcggagtaatgacgcatggcgacaacgagactcagcactttggaaatagactgaatggaaaaacgttcttgcgcgtctccggcctgaaaaagctgtccgtcaacggtacagatagcaatccccaatcgggaaccgtctactgtagccagcgccggaatataatccgcgactttaccctgaccaatgagcggccgcacttgccgcaagatgttttctaaaattgcattatccatggcgactgccactttctactcctggaccgcaggtctgaaaagacctgcgagtatatcagagctgaatatgtcgcgtcagatccggtctttccacaccgtctggatattacagaattcgtgtaagccgaaatgggaaagctcacgaccaaagccactctttttcacgccaccaaaggccactcgcgcgtcgctggcacaataaccattgataaacaccccaccgcattccagacgtgccgccatctgtctggcctgtgtttcgtcagtggtaaaaatggtcgcactaaggccgaactcactatcattagccagttccagtgcatgttctgcatctttcgcaatggtgattgccgcaacggggccaaacatttcttcccgaaacgcggtcatttctggggtaacattcgccagaaccgttggcggatagtagttacctgccccagccatcttttccccgcccagtaacaaacgcgcaccctgcgccagggttttctccacctgatgatgcagctcatcacgtaaatcaaaacgagccattggtccgagagcgttctcttcgtcacggggatcgcccattttcaaggctgccgcagctgccacaaaacgttcggtaaatgcgctagcaattccctcttcgataataaagcgttttgccgctgcacatacctgtccggtattctgataacgtccggctaccgccgctttcaccgccagttccagatcggcatcgttaagcacaataaacggatcgctaccgcccagttccagtacgcattttttcagtgccgctccagcctgtgcgccaatagccgctcccgcacgaacacttccggtcaccgtgacagcagcaatgcggctgtctttaatcatctgactgacaccgtcgttgtcggcattcagccagccatatacgccttgtgggatacccgcatctttaaacacctgggcaatgagctgtgcacagcccatcacattcggcgcatgtttaagtaagtagccgttacctgcaagaatgatgggaacagcgccacgcatcacctgccataacggaaaattccacggcataatcgccagaatcgtccccaacggtcgatactcaataaccgcctgctgattttccaccagcgtaggttccgccttcagcattgccggaccatgttctgcataccagtcacacaaattcgcgcttttcgccacttcagcgcgcgcctggttgattggtttgcccatttcgcgggtgatcatttgcgccatttcttcgctacgagcgcgcagagccttaccgatatcacgcagtttttcagcacgataatctatatttgtctcgcgccagtcgcgaaagcctgctgccgccagctgaagtgcgttttcgatatcgtcagcgccagcccacggcagcacagaaagttgttcacccgtggcaggatttatgctaattgcatgagttgccggagtaatggtcatcggggtatctcctttatgagtcatggtatgaagatacgcagatttactcttgctttaaaatgaataatattaagccacttattcacgaatcgagaatgctatggatctgacccaactggagatgttcaacgcggttgccgaagctggcagcataacccaggctgcagcaaaagtgcatcgcgtgccgagcaatctcactacccgtctgcgccagctggaaacagaactgggggttgatctgtttattcgcgagaatcagcgtttacgtctctctcctgccgggcataactttttacgctatagccaacaaattctcgcgttagtggatgaagcgcggagcgttgtcgctggcgatgagccgcaaggtttattttctcttggtagcctggaaagcaccgctgcagtgcgcattccagccacgctggcggaattcaaccgtcgttatcccaaaattcagtttagtctttccaccggcccttccggcactatgctggatggtgtactggagggaaaactgaatgcggcgtttattgatggacccattaaccatactgccatcgacgggataccggtataccgcgaggaactgatgatcgtcacgccacaaggatatgcgccagtaacccgtgccagtcaggttaatggcagtaacatttatgccttccgcgccaattgtagctatcgtcgccacttcgagagctggtttcatgctgacggtgccgctccgggaactatccatgagatggagtcttatcacggaatgttggcctgtgtgatcgcaggagcaggcattgcgcttattccgcgctctatgctggaaagtatgccggggcatcaccaggttgaagcgtggccgttagctgagcaatggcgttggttaacaacctggctggtctggcgtcgtggtgcgaaaacacgtccgctcgaggcatttattcaactgctggatgtgcctgacagcgcaagacagggatatcaatgagctatttttgatagttcttgcggttaatatgctctatatagtgatgttccgatgacttatgactatatggggcaaatatggttacgccagtaagcatcagcaattacatatctcttcctgatgattttcccgtacgtaatattgcaccgcaggtaaaagaagttttaaaggattttattgatgcacttagtacaataatatgtaatgaagagtggcgcacgtctttaaacatcaacagtgccacaaaaaagatatttaataaccttgacaacttaagttatattcagaggacttcttttcggggtaacgacacgctatacaatgaaaaggttcagtttaaactcacttatcccgccaggaatggaagacacaaagaaaatattgaatttcaggtagtaataaatttaagccctatttatttagataattttcgccatgatggagaaattaatattttttgcgctcccaacccaaagcctgtcactatggggcgcgtatttcagaccggcgtcgagcgtgtactctttctgtttctgaatgattttattgaacaatttccaatgatcaaccctggtgttcccatcaaaagagcgcatacaccacatattgaacccctgcctagcgatcaccataccgctgcagattacttacgccagtttgatttgcttgtcctgaattttatctctcgcggtaattttgtcatactcccccgattatggaataactctgaggttcacagatggttcgtcaataaagatcctaacttgatcaccgccattctcgacataacggacagcgaattaaaagaggatttgttgcaaagcctgatggatagtttaggttctaacaaacatgtactacccgaagtctgcatctgctttttatcccttttagcagaacaagaatctcctcattttcagaacttgtttttatttttcgccaatatgttattgcactatcaccaatttatgaatcccaatgaaagtgatttgaatgacgtgttgatgccagcaagtttaagtgatgataaaattatcaaacatatggcgcgcaggaccctcaaactgtttgtaaaaaatgaaacaccgccaaaagttactcacgaagacctggtgaaaaacaggcctcgctcccctgtcagaccacctatacccgcaaccgccaaaacgccagacctccctgaacgtcattaaaccgtgatgttaccgactctctgacgcgtgaaagaatcagcgtcagagaaacggaaaacgcgatccagatcacaaatgcattgtattcacatcattaaccgttttaagatcatttcatcactttttcgcaactcacccgataatctgttatgacaacaaacactgtttcccgcaaagtggcgtggctacgggtcgttacgctggcagtcgccgccttcatcttcaacaccaccgaatttgtccctgttggcctgctctctgacattgcgcaaagttttcacatgcaaaccgctcaggtcggcatcatgttgaccatttacgcatgggtagtagcgctaatgagtttgccttttatgttaatgaccagtcaggttgaacggcgcaaattactgatctgcctgtttgtggtgtttattgccagccacgtactgagctttttgagctggagctttaccgttctggtgatcagtcgcattggtgtggcttttgcacatgcgattttctggagcattacggcgtctctggcgatccgtatggctccggccgggaagcgagcacaggcattgagtttaattgccaccggtacagcactggcgatggtcttaggtttacctctcgggcgcattgtgggccagtatttcggttggcgaatgaccttcttcgcgattggtattggggcgcttatcacccttttgtgcctgattaagttacttcccttactgcccagtgagcattccggtagtctgaaaagcctcccgctattgttccgccgcccggcattgatgagcatttatttgttaactgtggtggttgtcaccgcccattacacggcatacagctatatcgagccttttgtacaaaacattgcgggattcagcgccaactttgccacggcattactgttattactcggtggtgcgggcattattggcagcgtgattttcggtaaactgggtaatcagtatgcgtctgcgttggtgagtacggcgattgcgctgttgctggtgtgcctggcattgctgttacctgcggcgaacagtgaaatacacctcggggtgctgagtattttctgggggatcgcgatgatgatcatcgggcttggtatgcaggttaaagtgctggcgctggcaccagatgctaccgacgtcgcgatggcgctattctccggcatatttaatattggaatcggggcgggtgcgttggtaggtaatcaggtgagtttgcactggagtatgagcatgattggttatgtgggcgcggtgcctgcttttgccgcgttaatttggagtatcattatatttcgccgctggccagtgacactcgaagaacagacgcaataattgaaaggcccattcgggccttttttaatggtacgttttaatgatttccaggatgccgttaataataaactgcacacccatacataccagcaggaatcccatcagacgggagatcgcttcaatgccacccttgcccaccagccgcataattgcgccggagctgcgtaggcttccccacaaaataaccgccaccaggaaaaagatcagcggcggcgcaaccatcagtacccaatcagcgaaggtactactctgacgcactgtggacgcgctgctaataatcatcgctatggttcccggaccggcagtacttggcattgccagcggcacaaaggcaatattggcactgggttcatcttccagctcttcgctcttgcttttcgcctccggactatcaatcgctttctgttgcggaaagagcatccgaaaaccgataaacgcgacgattaagccgcctgcaattcgcagaccgggaatgctaatgccaaatgtatccatcaccagttgcccggcgtaatacgccaccatcatgatggcaaatacgtacacgctggccatcaagctctgacgattacgttcggcactgttcatgttgcctgccaggccaagaaataacgcgacagttgttaatgggttagctaacggcagcaacaccaccagccccaggccaattgctttaaacaaatctaacattggtggttgttatcctgtgtatctgggttatcagcgaaaagtataaggggtaaacaaggataaagtgtcactctttagctagccttgcatcgcattgaacaaaacttgaaccgatttagcaaaacgtggcatcggtcaattcattcatttgacttatacttgcctgggcaatattatcccctgcaactaattacttgccagggcaactaatgtgaaaagtaccagcgatctgttcaatgaaattattccattgggtcgcttaatccatatggttaatcagaagaaagatcgcctgcttaacgagtatctgtctccgctggatattaccgcggcacagtttaaggtgctctgctctatccgctgcgcggcgtgtattactccggttgaactgaaaaaggtattgagcgtcgacctgggagcactgacccgtatgctggatcgcctggtctgtaaaggctgggtggaaaggttgccgaacccgaatgacaagcgcggcgtactggtaaaacttaccaccggcggcgcggcaatatgtgaacaatgccatcaattagttggccaggacctgcaccaagaattaacaaaaaacctgacggcggacgaagtggcaacacttgagtatttgcttaagaaagtcctgccgtaaacaaaaaagaggtatgacgatgtccagacgcaatactgacgctattaccattcatagcattttggactggatcgaggacaacctggaaagcccactgagtctggagaaagtgagtgagcgtagcggttactccaaatggcacctgcaacggatgtttaaaaaagaaaccggtcatagtttaggccaatacatccgcagccgtaagatgacggaaatcgcgcaaaagctgaaggaaagtaacgagccgatactctatctggcagaacgatatggcttcgagagccaacaaactctgacccgaaccttcaaaaattactttgatgttccgccgcataaataccggatgaccaatatgcagggcgaaagccgctttttacatccattaaatcattacaacagctaattgaaaacgtgacaacgtcactgaggcaatcatgaaaccacttagttccgcaatagcagctgcgcttattctcttttccgcgcagggcgttgcggaacaaaccacgcagccagttgttacttcttgtgccaatgtcgtggttgttcccccaagccaggaacacccaccgtttgatttaaatcacatgggtactggcagtgataagagcgatgcgctcggcgtgccctattataatcaacacgctatgtaatttgttctggccccgacatctcggggcttattaacttcccacctttaccgctttacgccaccgcaagccaaatacattgatatacagcccggtcataatgagcaccgcacctaaaaattgcagacccgttaagcgttcatccaacaatagtgccgcacttgccagtcctactacgggcaccagtaagcttaacggtgcaacccgccaggtttcatagcgtcccagtaacgtcccccagatcccataaccaacaattgtcgccacaaacgccagatacatcagagacaagatggtggtcatatcgatagtaaccagactgtgaatcatggttgcggaaccatcgagaatcaggctggcaacaaagaagggaatgattgggattaaagcgctccagattaccaggctcatcaccgccggacgcgtactgtggctcatgatctttttattgaagatgttgccacacgcccaactaaatgctgccgccagggtcaacataaagccgagcatcgccacatgctgaccgttcagactatcttcgattaacaccagtacgccaaaaatcgctaaggcgatccccgccaattgtttgccatgcagtcgctccccgaaagtaaacgcgccaagcatgatagtaaaaaacgcctgtgcctgtaacaccaggctagccagtccagcaggcataccgaagttaatggcacaaaaaagaaaagcaaactgcgcaaaactgatggttaatccataccccagcagcaaattcagtggtactttcggtcgtgcgacaaaaaagatagccggaaaagcgaccagcataaagcgcaaaccggccagcatcagcggtggcatgttatgaagccccactttgatgaccacaaaatttagcccccatacgaccactaccagtagcgccaacaccccatcttttcggctcattctaccgcctctgaatttcatcttttgtaagcaatcaacttagctgaatttacttttctttaacagttgattcgttagtcgccggttacgacggcattaatgcgcaaataagtcgctatacttcggatttttgccatgctatttctttacatctctaaaacaaaacataacgaaacgcactgccggacagacaaatgaacttatccctacgacgctctaccagcgcccttcttgccagcagcttgttattaaccatcggacgcggcgctacgctgccatttatgaccatttacttgagtcgccagtacagcctgagtgtcgatctaatcggttatgcgatgacaattgcgctcactattggcgtcgtttttagcctcggttttggtatcctggcggataagttcgacaagaaacgctatatgttactggcaattaccgccttcgccagcggttttattgccattactttagtgaataacgtgacgctggttgtgctcttttttgccctcattaactgcgcctattctgtttttgctaccgtgctgaaagcctggtttgccgacaatcttagctccaccagcaaaacgaaaatcttcagtatcaactacaccatgctaaacattggctggaccatcggtccgccgctcggcacgctgttggtaatgcagagcatcaatctgcccttctggctggcagctatctgttccgcgtttcccatgcttttcattcaaatttgggtaaagcgcagcgagaaaatcatcgccacggaaacaggcagtgtctggagcccgaaagttttattacaagataaagcactgttgtggtttacctgctctggttttctggcttcttttgtaagcggcgcatttgctagttgcattagtcaatatgtgatggtgattgctgatggggattttgccgaaaaggtggtcgcggttgttcttccggtgaatgctgccatggtggttacgttgcaatattccgtgggccgccgacttaacccggctaacatccgcgcgctgatgacagcaggcaccctctgtttcgtcatcggtctggtcggttttattttttccggcaacagcctgctattgtggggtatgagtgctgcggtatttactgtcggtgaaatcatttatgcgccgggcgagtatatgttgattgaccatattgcgccgccagaaatgaaagccagctatttttccgcccagtctttaggctggcttggtgccgcgattaacccattagtgagtggcgtagtgctaaccagcctgccgccttccagcctgtttgtcatcttagcgttggtgatcattgctgcgtgggtgctgatgttaaaagggattcgagcaagaccgtgggggcagcccgcgctttgttgatttaagtcgaacacaataaagatttaattcagccttcgtttaggttacctctgctaatatctttctcattgagatgaaaattaaggtaagcgaggaaacacaccacaccataaacggaggcaaataatgctgggtaatatgaatgtttttatggccgtactgggaataattttattttctggttttctggccgcgtatttcagccacaaatgggatgactaatgaacggagataatccctcacctaaccggccccttgttacagttgtgtacaaggggcctgatttttatgacggcgaaaaaaaaccgccagtaaaccggcggtgaatgcttgcatggatagatttgtgttttgcttttacgctaacaggcattttcctgcactgataacgaatcgttgacacagtagcatcagttttctcaatgaatgttaaacggagcttaaactcggttaatcacattttgttcgtcaataaacatgcagcgatttcttccggtttgcttaccctcatacattgcccggtccgctcttccaatgaccacatccagaggctcttcaggaaatgcgcgactcacacctgctgtcacggtaatgttgatatgcccttcagaatgtgtgatggcatggttatcgactaactggcaaattctgacacctgcacgacatgcttcttcatcattagccgctttgacaataatgataaattcttcgcccccgtagcgataaaccgtttcgtaatcacgcgtccaactggctaagtaagttgccagggtgcgtaatactacatcgccgattaaatgcccgtaggtatcattaaccaatttaaatcggtcaatatccaacaacattaaataaagattcagaggctcagcgttgcgtaactgatgatcaaaggattcatcaagaacccgacgacccggcaatcccgtcaaaacatccatattgctacggatcgtcagcaaataaattttgtaatcggttaatgccgcagtaaaagaaagcaacccctcctgaaaggcgtcgaaatgcgcgtcctgccagtgattttcaacaatagccagcattaattcccgaccacagttatgcatatgttgatgggcagaatccattagccgaacgtaaggtaattcatcgttatcgagtggccccagatgatcaatccaccgaccaaactggcacagtccataagaatggttatccgttatttctggcttactggcatctctcgcgaccacgctgtgaaacatactcaccagccactggtagtgggcatcgatagccttattgagatttaacaagatggcatcaatttccgttgtcttcttgatcattgccactcctttttcacagttccttgtgcgcgctattctaacgagagaaaagcaaaattacgtcaatattttcatagaaatccgaagttatgagtcatctctgagataacattgtgatttaaaacaaaatcagcggataaaaaagtgtttaattctgtaaattacctctgcattatcgtaaataaaaggatgacaaatagcataacccaataccctaatggcccagtagttcaggccatcaggctaatttatttttatttctgcaaatgagtgacccgaacgacggccggcgcgcttttcttatccagactgccactaatgttgatcatctggtccggctgaacttctcgtccatcaaagacggccgcaggaataacgacattaatttcaccgctcttatcgcgaaaaacgtaacggtcctctcctttgtgagaaatcaaattaccgcgtagactaacgctagcgccatcgtgcatggtttttgcgaaatcaacggtcattttttttgcatcatcggttccgcgatagccatcttctattgcatgaggcggcggtggcgctgcatcctgttttaaaccgccctggtcatctgccaacgcataaggcatgacaagaaaacttgctaatacaatggcctgaaatttcatactaactccttaattgcgtttggtttgacttattaagtctggttgctatttttataattgccaaataagaatattgccaattgttataaggcatttaaaatcagccaactagctgtcaaatatacagagaatttaactcactaaagttaagaagattgaaaagtcttaaacatattttcagaataatcggatttatatgtttgaaaattattatattggacgagcatacagaaaaagcaaatcacctttacatataaaagcgtggacaaaaaacagtgaacattaatagagataaaattgtacaacttgtagataccgatactattgaaaacctgacatccgcgttgagtcaaagacttatcgcggatcaattacgcttaactaccgccgaaagttgcaccggcggtaagttggctagcgccctgtgtgcagctgaagatacacccaaattttacggtgcaggctttgttactttcaccgatcaggcaaagatgaaaatcctcagcgtaagccagcaatctcttgaacgatattctgcggtgagtgagaaagtggcagcagaaatggcaaccggtgccatagagcgtgcggatgctgatgtcagtattgccattaccggctacggcggaccggagggcggtgaagatggtacgccagcgggtaccgtctggtttgcgtggcatattaaaggccagaactacactgcggttatgcattttgctggcgactgcgaaacggtattagctttagcggtgaggtttgccctcgcccagctgctgcaattactgctataaccaggctggcctggcgatatctcaggccagccattggtggtgtttatatgttcaagccacgatgttgcagcatcggcataatcttaggtgccttaccgcgccattgtcgatacaggcgttccagatcttcgctgttacctctggaaaggatcgcctcgcgaaaacgcagcccattttcacgcgttaatccgccctgctcaacaaaccactgataaccatcatcggccaacatttgcgtccacagataagcgtaataacctgcagcatatccgccaccaaaaatatgggcgaaataactgctgcgatagcgtggcggtatagcaggaagatccatattttccgccaccagcgcccgcaattcaaaatcatcgacatcctgcattgcttcgttttcttccaggcaatgccagcgcatatcgagaagtgcggcgctaagcagttcgctcatctcataccctttgttgaacaggctggcattacgcattttctgttgcagttcgtcaggcattgctgccccgctctgataatgccgggcgtagcgagcgaatacctgcggatgcgttgcccagtgttcgttgatttggctcggaaattcgacaaaatcacgcggcgtgttggtgccggaaagcgtggcataacgctggcgggcaaaaaggccgtgcagcgtatgaccaaattcatggaataaggttatgacatcatcccagagtaacaacgcaggctcaccggcagcgggtttctgataattgcagacgttataaattaccggatgtgttttattaagcgtactttgctcaacaaaattgcccatccatgcaccgccgcttttactatcacgggcgaagaaatcaccgtaaaataacgccagccccacgccattatgatcaaaaatttcccacacacgaacgtcaggatggtagacaggaatatcaaaacgttcgacaaacttaataccgaagagctgattcgcggtccagaatacaccttcatttaacaccgtgtttaattcaaaatatggcttgagctgcgcctcatcaagatcaaatttctcccgccgtacctgttccgcataaaatgcccagtcccacggctgcgcgctaaacccgccctgctgcttatcgataaccgcctgtatggaggctaattcatcgctcgcacgttgacgcgccgctggaacaatttcccgcataaagttaagtgctgcttcaggtgtttttgccatctgatcggcgattttccatgcggcataatgaggaaaaccaagtagtgttgcctgttgtgcacggatctccaccagacgttgaatgatagcgcgggtatcattggcatcatttttttccgctcgcgtccagcccgcaataaacagtttttcacgcgtcgcacgatcgcgcatttcggcaagcgccggttgttgggtggtattcagcagcggaatcagccatttgttatccagacctttctcgcgagccgcctctgccgccagcgcaatctcttgctcactcattcctgccagctgcgcgatatcgttcacaaccagaccgccggatttatttgctgccagtaatcgctggttaaactggctggtcagggtcgcagcttctgtattcagtacttttaattttgctttatcagcttgcgcaagtttggctccggcaaggacaaaacgttgatgaatcacctccaccaggcggatggattcactatcaagccccagggattcacggcgctgccagacagcatctacccgcgcgaataattcaccgttcagatagatatcattagccagttccgccagttcagcggaaaactgctcgtcaagacgctgtaattcatcattggtatgcgccgcagtcatcgcaaaaaagacgctggtaacgcgggtaagtaattctccgctttgttccagtgccagaatagtattgttgaaatcaggcatttgcgggttaagcgcgatggcagcaatttctgcccgcttttgctgcattccctcatcgaatgccgggcgatagtgatgattggcaatttgatcaaaatggggagccagatacggcagtgtgctttgcacaaggaaaggattcattgttgtcattttcttctcctgaacgcgaggtgttccatagcgtaggcttactgataacggagtgcaatcttgcaatccagtattacccgctcttaagcatcccgtgctatgttattgacacacaaaagcgttgaggaacagtgagaagcgcagtgcccagccatcccgatactgctgctttcaccaaatccttagtgcttctttcgtgtttttctattgtcataatggttatctctaaaaaagaggtaagatgcgtactacttactcgccgttattggtattattcagaaaaagtgagtaagactttgcagcaatgtttttgatcctgttcaaataaactaatggcatcagcaacatgctggaaatcaaacgtatgggtaattaatttttctggtttaattaaccctttacttaaccagtcgataacgatcgggaatttatttgcatttaagcgactagagaaaatagagagttcttttccggtaattccttgctgaatcacttcagacggttcactggagaaccccatcaatacaatacgtgccgctggagaagccagcgttacggcctctttcaggatagaaggatgacaagccgcatcgataattaatgtcggcttgatgcctttttcagtgaaaatctcgccaagcggtgtctggctgttattaatcgcccagtcagccccgctctctttcgctttttccagtcgttcatcaatgcgatcggcaacaatcacatttttaacgttatagacgccttttaatacctgaacgatcgtcaggccgattggaccggcaccataaaccagaacggtatcattttcagtcggttgaccatgtccggttacgttagccgcaatggtaaaaggttcgatcattaccgcatattgatcggccactgcttcaggaattttccacgcattttttgccggaaccacggcatattcactgaaaccaccgtcagcgtgcacacctaatacagccagtgtcgtacaaacgttcggtttacctatagagcacggatagcaatgcccacagctgaccaccggatcgacagcaacacgttcaccgactctggcgctttccacgccttcacccactgcatcaatgacgccaaagaattcatgaccaatgacgcgcggatatttcgcaaaaggattatgcccacgataaatatggctatcactaccacaaattccggcaagtttcacttttactcgtacttcacccgcactcggggtgggtatttcacgttcgacaatcgccagttgattcggtttttcaattaatatgcttttcattatcttactccttaccagttccacagcgtgccatcttccagacgtgcgactggtagataagcaggttcatagggatatttcgccgccagcttttcatcgaattcgataccaagacccggtttgtctcccggatgcatatagccgttatcgaaagtccagttgtgcgggaagacttcgagcatttgttcggaataacccatgtattcctggacaccgaaattggggacccacagatcaaagtgcagcgccgcagccatgcagactggactcaaatcggaaggaccgtgactgccagtacgtacctgatacaggctagcaaaatcggcaatccggcgcataccggtaattccgcctgcatgggtcagcgtggtgcggatataatcgatgagttgctcttcaatcagttgtttgcagtcccagatgctgttgaagacttcacccactgcgatgggtgtgacggtatgttggcgaatgagacggaagcattcctggttttccgcaggcgtcgggtcttccatccagaacatgcgataatcttcaatgcttttaccaaagcgcgccgcttcaataggcgttaagcgatggtgcatgtcatgcagcaaatgttcattaaaaccaaacttgttacgtaccgcgtcaaacaatttcggcatgaaatcgaggtatttctccgtgctccacagctgctcttccggccactgtcctttggttgcgggttcataagccagacctttacctttgctcatgccgtaggtggttttcataccagggattccgcactgcacgcggatggctttgaatccaagctcttgatgacgggcataatcatccagagcttcatcaatactgtgaccggtggtatggcaataaaccatcaccccttcacgagacgcgccgccgagtaactggtaaagcggcatgttggcagctttggctttaatatcccacagcgccatatcaaccgcactaatggcgctcatcgtaaccggaccgcgacgccagtaagcacctttatagaaaaactgccagatatcttcgatacggtgcgcatcgcgaccaataagctgcggacaaaggtgatcctgcaaataagaggccacggaaagctcacgtccattgagggtggcatccccaaggcccgtaataccgtcctcagtggtgatttttaatgtgacgaaattacgccccggacaggtaacaaaaacttcagcctttacgatcttcatgttcgattccttgcatcgcttgtcgtgatgcatgaaatctacgcaactgagctactaccatacaagtataaagatcgaaaaaagccggagtgatcacaaaaaaaggcgtatatttgcgctgtgaatggttgacaaaagatgaaatagaataccttttgtcagctgacacttcctcttatcttattgataaaatggatttatgttcttacgtgcgcccccagcccgcaacaatgatcaacatgccgcaaagcgcaatcaacgcacccgtccagtcataaagagtcagtttcacgccatccacaacgcgcagccacatcaacgccgtgcagacataaacgccaccataagccgcgtaaacacgcccactcgccgctggatgcaacgttaacaaccagacaaacagcgccagactaatccccgccggaagcaacagccagatactggcgtttcgttttaaccacaaccagggcagaaagcatccaataatttcacacagcgcagtagcaaaaaatagtaacgttgttttaatcatctttgtctcttattgacatcatgtatagttatagggcgacataatatcatcaatataaacaccctcctggtacgttttgcgtccgcagtggatggtgtagaatcacctttaatcattcatacagggaatgaattatgaaaatcactctcagcaaacgaatcggcctgctcgctattctgctgccttgcgcactggcattgagcacaactgttcatgccgaaactaacaaactggtgattgagtctggcgacagtgcacaaagccgccagcacgccgctatggaaaaagagcaatggaatgacacgcgcaatctgcgccagaaagtgaataaacgcactgaaaaagagtgggataaagccgacgccgcttttgataaccgcgataaatgtgagcaaagcgccaacatcaatgcctactgggagcccaatactttgcgctgcctggaccgtcgaactggccgcgttattaccccctaacctgttattgatttaaggaatgtaaggacacgttatgccaagcgcccacagtgttaagctacgcccgctggagcgtgaagatttacgctatgtacatcaactcgacaataacgccagtgtgatgcgttactggtttgaggaaccctacgaagcctttgttgaactctctgatctgtatgataagcatattcacgatcagagcgaacggcgctttgtggtggaatgtgacggcgaaaaagccggtctggtggagctggtggaaattaaccatgttcatcgccgcgcagaatttcagataattatctccccggagtatcaggggaaaggtctggcaacccgtgccgccaaattagcaatggactatggctttaccgttctcaatctctataagctgtatctgatcgttgataaagagaatgaaaaagcgattcacatttaccgcaagcttggctttagcgttgaaggtgaattgatgcacgagttctttattaatggtcaatatcgtaatgccattcgcatgtgtatattccagcatcagtatctggcagagcacaaaacaccgggtcagactctcctgaagccgaccgcacaataacattaataataatcgatcgtatttttgatggtgtaaacccgttcgacggcgggttttactccttcatcaacaatgattagctgacagtccaccggattagcgtgactgtcatattcacagctctgttttacattaccaacccgttgattattcagtaaagtaaccgctgtgtaatctaattttttgatcggatccgtacttggcgtggcgctgacagataatgttttgtcgttacttttcgtggttttacccagcggataaccctgatcatcatagcgatattccatctgcatttgtttgctgctggctttaatcacgaagccattatcatcggtttcccaactcaccccggcagaaggtaattctgctagctggcattttccctgtaaacgtactctcttctccagcgtctcggcatcacggtaataattggcgtccagtaccagagcgaccacggtattattttccagatccagtaattcgagactatcaaaacagccttcttcgctcaaagtcccagaaacacgtttcgtcacttcaccttgctcatccattaatgtctgagtgaaatcttttaccggaccacgcagcggatcaaaatcgaattcattagagaaactggccatctcaggggtaaaactaagtgttacctctgtgcggtcacatcctgtgaggaatatcgcgagtaagcatggtagtaatttgtatttcacaacagtcaccagagagtagagatgattctcaatcatagtagcaaatacagtactttacacgttaaatgctatgcttaaagaagttatcttcgcgtaaggagcttatgatgaaactcagtacctgctgtgccgcgcttctgctcgccctcgccagtcccgcggtactcgccgcgccgggatcctgtgagcgcatacagagcgatataagtcagcgcattatcaataatggcgtacccgaaagcagcttcacgttaagtattgtacccaatgaccaggttgatcagcctgattcccaggtcgtcggccattgcgctaatgatacgcataaaattctctatacccgcaccaccagcggtaacgtctctgctcccgcgcagtctagccaggatggcgcgcctgccgaaccgcagtaacacattatcgactgaacgccggatatgacaaatccggcgatttgaacatacaacataatcccaccttattactcatacccttctattgatatggattaataattcttaacccaaaatgggtagactccctctattgttagcgcgctaaatattcaatatataaacttttatataacgataaagaacagggagtgagttatgtccaaaaatgaacgaatggtgggcatcagccgcagaacactcgttaaatctaccgcgataggttctctggcgctggctgcaggcggtttttctttgccgtttaccctgcgcaatgcagcagcagcggtacaacaggcccgcgaaaaagtggtctggggtgcctgttccgtcaactgtggtagccgctgtgcacttcgtctacatgttaaagataatgaagtgacctgggtggaaactgacaataccggcagcgatgagtacggcaaccatcaggtacgcgcctgtttgcgcggtcgctccatccgccggcgtattaatcatcccgatcgcttgaattacccaatgaaacgcgtgggcaaacgcggcgaaggcaaattcgaacggattagctgggatgaagccctggatactatcgccagtagcctgaagaaaaccgtcgaacaatatggcaatgaggctgtatatattcagtactctagcgggatcgttggcggcaatatgacccgctctagcccaagtgccagcgcggtcaaacgcctgatgaactgctacggcggtagtctcaaccagtatggctcctacagcactgcgcaaatttcctgtgccatgccctacacctacggcagtaatgatggcaacagcaccacggatattgaaaacagcaagctggtcgtgatgtttggtaacaacccggcagaaacccgcatgagcggtggtggcatcacttatcttcttgaaaaagcgcgcgagaaaagcaacgccaaaatgattgttatcgatccgcgatataccgatacggctgccggtcgtgaagacgaatggctccctattcgcccgggcaccgatgccgcgctggttgcgggtattgcctgggtattgattaacgaaaatctcgttgatcaaccttttctcgataaatactgcgtcggctatgacgaaaaaaccttacccgcagatgcacccaaaaatggtcactataaagcctatattcttggtgaaggtgacgataaaacagcgaaaacgccgcagtgggctagccaaattaccggtatcccggaggaccgtatcatcaaactggcgcgtgaaattggcacagcaaaacccgcttatatctgccagggctgggggccacaacgccaggcaaacggcgaactgactgcacgcgctattgctatgttacctattttgacgggcaatgtcggcatcagcggcggaaatagtggcgcgcgtgaaagcacctataccattaccatagaacgcctgccggtgctggataatccggtcaaaacgagtatctcctgcttcagctggacagatgctatcgatcatggtccgcaaatgacggcaatccgcgacggcgtccgcggcaaagataaactggatgtgcccattaagttcatctggaactacgcgggaaataccctcgttaatcagcattctgacatcaacaaaacgcatgaaattctgcaggacgaaagcaaatgcgaaatgattgtggtcatcgaaaactttatgaccagtagcgcaaaatatgccgacattctgctgccagacctgatgaccgttgagcaggaagatattattcctaacgactacgccggtaacatgggatatctcattttcctccagcctgtcaccagcgaaaaattcgaacgcaaaccgatttactggatcctgagtgaagtcgcgaaacgtcttggacctgacgtctatcaaaagttcacagaaggtcgcacgcaggaacaatggttacaacatctgtacgccaaaatgcttgccaaagatccggcgttaccgtcttacgacgaactgaaaaaaatgggtatctataagcgtaaagatcccaatggccattttgtcgcctacaaagcatttcgtgacgaccccgaggcaaatccacttaaaacgccttccggtaagattgaaatttattccagcaggctggcggaaattgcccgtacctgggaactggaaaaagatgaagtgataagcccattgccagtttatgccagtacctttgaaggctggaactcccctgaacgtagaaccttcccactgcaactgtttggtttccattacaaatcccgtactcacagcacctacggcaatattgatctcctgaaggctgcctgccgtcaggaggtgtggatcaaccctatagatgcgcagaaacgtgggattgccaacggcgatatggtgcgggtgtttaaccatcgtggcgaagttcggctaccagccaaagtaacaccacgtattctccctggagttagcgctatgggccagggagcctggcacgaggccaatatgtctggcgataaaatcgaccatggcggctgtgtgaatacgctaaccactctgcgccctagtccactggcgaagggaaacccgcagcacactaatctggtcgagatcgaaaaaatataacccacgacaaccataaattctggcatgacattttgtttgaaaagcaataagtgagtaatgatgaaaatccataccacagaggcgctcatgaaggctgaaatcagccgtagaagtctgatgaaaacctccgcacttggcagtcttgcgctggcaagcagtgctttcactctgccattttcccaaatggtccgggcggcagaggctccggtagaagagaaagcggtctggagttcctgcaccgttaactgcgggagccgctgtctgttacgtttgcatgtgaaagatgacaccgtgtactgggtggagtctgatacgacaggtgacgacgtctacggtaatcatcaggttcgagcgtgtttacgcgggcgctctatccgccgacggatgaatcatcctgataggttgaaatatcccatgaagcgcgtcggcaagcgcggtgaaggtaaatttgaacggataagttgggacgaagccctggataccatcagtgataatcttcggcggatcctgaaagattacggcaatgaggctgtacatgtcctgtacggaacaggcgtagatggcggaaacatcaccaacagtaacgtcccgtaccgtctgatgaactcttgcggtggttttctcagtcgctatggcagctacagtaccgcacagatcagtgccgcaatgagttatatgttcggtgccaatgatggcaacagcccggatgatatcgccaatacgaaactggtcgttatgttcggaaataacccggcagaaacgcggatgagcggcggtggtgtcacttactacgtcgagcaagcccgcgaacgtagtaacgcacgcatgatcgtcatcgatccacgttataacgacactgctgccgggcgtgaagatgaatggctgcccattcgccctggcaccgatggcgcactggcctgtgcgattgcctgggtactgattactgaaaacatggtcgatcagccatttctcgacaaatattgtgttggttacgatgaaaaaacgctgcccgccaacgcaccacgtaacgcgcattataaagcctatattctgggcgaagggcctgacggcatagctaaaacgccggaatgggcagcaaaaatcaccagcatcccggcagaaaaaattatccagttggcacgagagatcggtagtgcaaaacctgcttatatttgtcagggttgggggccacaacgacattccaacggcgagcaaacatcccgcgctattgccatgctttccgttctcaccggcaacgtcggcataaacggcggcaacagtggcgtacgcgaaggtagctgggatctgggggtagaatggttcccgatgctcgagaatcctgttaaaacgcagatttccgtctttacatggacagatgccatcgaccatggtacggaaatgaccgcgacccgtgatggtgttcgtggaaaagaaaaactggatgtccccatcaagtttttatggtgctacgccagtaacacattgatcaatcaacatggcgacatcaatcacacccatgaggtgcttcaggatgacagcaagtgcgagatgattgttggcattgaccacttcatgacggccagcgctaagtattgcgatatcctgttgcccgacctgatgccaacagagcaagaagaccttatctctcatgaatctgcagggaatatgggctatgtgatcctcgcccaacccgcaaccagtgcaaaatttgaacgcaaacccatctactggatgctgagtgaagtcgccaaacgcttaggaccagacgtttatcaaacctttactgaaggtcgcagtcagcatgaatggatcaaatatctccatgcgaaaacgaaggaacgtaaccctgagatgcccgactacgaggagatgaaaacgaccgggatctttaagaaaaaatgcccggaagaacactacgtcgctttccgcgcattccgtgaagatccacaggcaaacccgttgaaaacacctagcgggaaaatcgaaatttattctgaacgactggcgaagattgcagatacctgggaattgaaaaaagatgaaattattcatccccttcctgcgtataccccaggttttgatggctgggacgatcccctgcggaaaacctatccactgcagttaacgggcttccattacaaagcgcgtacccactccagctacggcaatattgatgtgttacagcaggcctgcccacaagaggtgtggatcaaccccattgatgctcaggcacgcggtatccgtcatggcgataccgtgcgggtatttaacaataatggagaaatgctgattgccgcaaaagtgactccgcgtattctgcctggcgttaccgccatcgggcaaggtgcgtggcttaaagcggatatgtttggtgaccgggtcgatcacggcggcagtatcaatattctgacctctcaccgccctagtccgctggcaaagggaaacccgagccacagcaatcttgtccagatcgaaaaggtttaaggagtagcccatgaccacacaatatggattttttatcgattccagccgctgtactggctgtaaaacctgcgaactggcgtgcaaagattttaaagatcttggcccggaagtcagtttccgccgtatttatgaatacgctggcggcgactggcaggaagataatggcgtctggcaccagaacgtgttcgcttattatctctccatctcctgtaaccattgcgatgaccccgcatgtacaaaagtctgccccagcggcgcaatgcataagcgtgaagatggctttgtggtggttgatgaagatgtttgtatcggctgccgctactgccacatggcttgtccgtacggcgcgccacagtacaatgctgaaaaagggcacatgacgaagtgcgatggttgttatagccgcgtcgccgaggggaaacaacccatatgtgtcgaatcctgcccgctgcgtgcacttgagttcggtccaattgaagagctgcgccagaagcacggcactcttgctgccgtcgcgccactgccgcgcgcgcatttcacaaaacccaatatcgttatcaaacctaacgccaacagccgcccgaccggcgataccactggttatctggctaatccggaggaagtgtaaaatgggaaatggatggcatgagtggccactggttatctttaccgtattgggtcaatgcgtagtaggcgcgctgattgttagcggaattggctggttcgccgccaaaaatgacgcagaccgtcagcgtattgtccgtggcatgtttttcctctggctgttgatgggcgtcgggtttattgcctctgtcatgcacctgggaagcccactgcgggcgtttaactccctgaatcgaatcggagcttctggtctgagtaacgagattgctgccggttccatattttttgccgttggcggattatggtggctggtggcagtcatcggtaaaatgccgcaagcgttggggaaactctggttacttttcagcatggcgctcggcgtcattttcgtctggatgatgacctgcgtgtatcaaatcgacaccgtgccaacctggcataacggttacactacgctggctttcttcctgacggtattgttgagcggtccaatacttgctgccgcaattctgcgggcagctcgcgttacatttaataccacaccatttgccatcattagcgttctggcgctgatcgcttgtgccggggtgattgtgctgcaaggtttgtctctggcgtctattcacagttccgtgcaacaagccagcgcactggtaccagattacgcctccttacaggtctggcgtgtggtattgttatgcgcaggtcttggatgctggctttgcccgctcattcgtcgccgtgaacctcacgttgccggacttattctggggctaatcctcatacttggcggtgagatgatcgggcgtgtgctcttttatggcctgcacatgacagtaggaatggctattgcaggttaacaaattggtgcggggcaacccgcacatttcaggatgttaggaatgacccattttagtcagcaagataatttttctgtcgcggcgcgcgtgttgggcgcgctgttttattacgctccagagagtgcggaagccgcacctctggttgcggtactcaccagtgacggctgggaaactcagtggcctctaccagaagcgagtttagcgccgctggtgacggcttttcagacacagtgtgaagagactcacgcccaggcctggcagcgtttgtttgtcggcccgtgggcactgccgtctccgccgtgggggagcgtctggctggatcgcgaatctgtgctgtttggcgatagtacattggcacttcgtcagtggatgcgcgagaaaggcattcagtttgaaatgaagcaaaacgaaccggaagatcattttggtagtctgctgttgatggctgcgtggttggcggagaatggtcgccagacagaatgcgaagaattgctggcatggcacctttttccgtggagtacacgttttcttgatgtttttatcgaaaaagcagaacaccctttctaccgtgcactgggtgaactggctcgcttaacgctggcgcaatggcaaagtcaactgttaattcctgtcgcggttaaaccgctgtttcgataagatcaccgtaatattgccggatggtgacgattacgcgcaatccggcaataataggttacagtgtcacgtttttttatctcttaaagcacgcactgcttttgcggctggcctcttttgccgcaaaatagtcgcccgtgtttcattgcccatttctgctcatgcatcatctacacatctatccggatctgcgcactatgttccaccgtctgcttatcgcaacagtcgtcggtattctcgcggcctttgccgttgccgggtttcgtcatgcgatgctgctactggagtggttgttcctcaataatgactccggcagtctggtcaatgcagcgacaaacctttccccctggcgacggttgctaactccggcgctcggcggactggcggcgggtttgttgctgatgggctggcagaaatttacccaacaacgccctcatgcgccgaccgattatatggaagcgttgcaaaccgatggacagttcgattacgcagcaagcctggttaaaagccttgcctctctgctggtagtaaccagcggcagtgcaattggtcgcgaaggtgcgatgattcttttagctgcccttgccgcctcctgttttgcccaacgttttacgccacgccaggagtggaaattatggatcgcctgtggggccgcggcgggaatggctgcggcctatcgtgccccgcttgctggcagtttatttatagccgaagtgctgtttggcactatgatgttggcctctctcggcccggtgattatttccgccgtcgtggcattgctggttagcaatctgattaatcatagcgacgcgttactctacaacgtacaactcagtgtgacggttcaggctcgtgactatgcgctgattatcagtacaggtgtgctggcaggtctgtgcggaccactgttgttaacgttaatgaacgcctgtcatcgtggatttgtgagtctcaaacttgcgccgccctggcaactggcactaggcgggttgatcgtgggtctgctttccctgttcacacctgcagtgtggggcaacggctatagcaccgtacaatcctttttaaccgccccaccactgttaatgatcattgccgggatcttcctttgtaaactgtgtgccgtgctggcgagtagcggttccggcgcacccggtggggtctttacaccgacgctatttatcggtcttgccattggcatgttgtatggtcgtagcctgggattatggttccctgatggcgaagaaattacacttttactcggattgaccgggatggcgacactgttggcggcgaccacgcacgcgccgattatgagcacgttgatgatatgtgaaatgaccggggagtatcagctactccccggtttattgattgcctgcgtaattgcgagcgtaattagccggacgttacaccgtgactctatctaccgccagcacactgcgcagcatagctaagcggatgtattgccccagttcacgctgttcggcgcgcggcagataaggcagttcaccaatgagcggtgccggaagttttttacccagcacatcaatgatttccgcataatgcgccagtcctgggttgattcggttagccacccagccaatgagcggcagcccgtcgttggcgatcgcctgagctgttagcagtgcatggttaatgcaaccttcctgaataccgacaaccatcaacaccggcagttgttcctgcactacccattcagagagtggacgcaaatcattcatcagactgcgccagccgccagtcccttctaccacgacatgatcgactttttcggtcaggtttgccaggccgttactaatgagggtgtaattgattgggcaactgtgcgccacgctactttcttcttcgcttaacgcgataggattaactgcttcataaggcagttcgatggtactaacactctgcaacaccagggcatctttattacgcagcccttcgggtgtctctttgctccccttcgctacgggtttatatcccgcaaccgtttttccctgggaggctaacgcttgtagcaatgcgcgggaaaccaccgttttccctacagaagtgtctgtaccggtaataaagaaacgcttcagcatcactaactccaccgttatgcttcacaaatataaaccaggaaaataattaaccttgaaagtctaagttatgctttcctggcccaaattgagatagcgcaaattttggtagaacagttaaaaaatgttaaccctgcaacagacgaatcaacaaagaaccgttatacatcgcgtcttttaccagtgcagcgcctgccatcgtgccctggttagaaaactgagtactctcaacgctgatgtgctgactatacgcaggaagggcctgctgacggatgctgtcactgatgaccgggaagaggatatctgccgctttacttaacggactgccaatcagtattttttgtgggttaaataaattcaccatgatggcaagaatgcgcccgacatgcgcgcccaccccggtaatgatgtcttttgccagtagatcgccgcgcaatgccgcctgacacaaactgtccacggttaacggttgtccatgtaacatgctgctcatggattgattaagacgcagctgtgccagctcaagaatactgtccacgctggcgatggtttcgaggcagccgtgattcccgcaataacagcgtttcccatacgggtcgacctgtgtgtggcctatttccacgagactactgctgcctgcgtgtagcagatgaccatcggtaatgacgcccgcccccacgttgtgatcgataaccacctgaatcacatcgcgcgccccgcgactggcaccaaacaaggcctctgccatcgtccatgcgctgatatcatgctgaatataaaccggaacgccggtatgctgctccagcgcctcgccgagcggcatctcttttacatcctcgtagaacggcatgcgatgtacaataccattttccgtatcaataattcccggcaaggttatggcaatgctagttagacgctcaagttttttctggtggcggataaaaaactgatcgatatgggaaataatacgatccagcaatggcaagtcatcttttaacgccagttcctggctctcttccaccaccagtttgctgctcagatcgcgcagagcaaggaaaatctccccgcgactaatgcgcagagaaagatagtgccaggcttcagtttcaaccaccagccccaccgccggacggccacggttccccgcttctttgatttccagctcttgcaccaggtgtgcttcgagcatctcacggacaattttagtgatactggcaggagccagttgcgccagacgggaaagatcgatacggctgactggaccaagctgatcaatcaggcgataaaccgcgcccgcgttggtctgctttatttgatcaatgtgcccaggctggttttcagcaaccaccgcatactccctatattttcgcgctccgaaataatctgtaggctatggtgaagcacttcaatacgtgtcgtcaaatttttacttaggcatgtgattaacagcacatttttcgggctttttcgctgaaatttccctcacctgagagcattcagcagatgaatacgaaagttacgcgcagccggactttgttcatgatgtttcggccagaccaaccacatttcagaaaccgcatcctcttcagcaatcggcacccagcgcatttcgttgagctgaacacgtttaaaactcgcaggcaaaatactaacacccagaccggcggaaaccagaccgatgatggtcattgcctcgcccacctcctgagtgatgacgggcgtcaaatggtaacgtcgcatcagcccgagaatatcgtcatacagccctgtcccgacgtgcggatcaaaaaagacaaagggttctttcgccagttcagccagcgttacattcgggttatttgccaggggatgatcgtgcgggatcatcgccataagcggttcatggacgatgactgcgtgttcaaggctctccggtaacgctgtgttacgcagcaatcccatatccagcgttccttcaatgagcggagcgatttgctcgcgagtgttcatttcgcgggtttgtaaatggacatcaggataatcacggcgaaacaggcttaacgtatcggacaccgcccgaataaaaggagcgctgctagtaaaaccaatgcgcaactcccccgcttcaccctgatgcagcctttcagcgcgagcggcagcgtcatccaccatagacaggatttgccgactatctgcaagaaactgttttcctgctgccgtcagcaatacactgcgattggttcgtgccagcagtcgggcaccaatttgttgctccagcgcctgaatctgctgacttagcggcggttggctaatattcaggcgggcagcggcgcgcccgaaatgcagctcttccgcaacagcaacaaagtaacgcagatgacgaagttcaatattcatatttaaaacatcttatttgagattattaatatattagacagaacaattcgattttcctaccctatgtataagcctgatctacaggcatatttagcaaggatttcaagtgagccgtactacaactgttgatggcgctccggcaagcgacactgacaagcaaagcatttctcagccaaatcaatttattaaacgcggtacgccgcaatttatgcgcgtcaccctggcgctgttctctgccggactggcaacatttgcacttctctattgtgtgcagcctatccttccggtgcttagccaggagtttggcttaacccccgcgaacagtagtattagtctgtccatttccacggcgatgttggctattggtttgctgtttactggcccgctatccgatgccattggtcgcaaaccagtgatggtcacggcgctactgttggcctccatttgtacgttacttagcacaatgatgaccagctggcacggcattttgattatgcgcgccttgattgggcttagcttaagtggcgtggcagctgttggcatgacttatcttagcgaggaaatccatcccagtttcgtggcctttagtatggggttgtatatcagcggcaacagtattggcggcatgagcggacgcttaattagcggtgtcttcacggactttttcaactggcgaattgctctggcggcaatcggttgtttcgcgctggccagcgcgttgatgttctggaaaatcctccctgaaagtcgccattttcgcccgactagcctgcgccctaagacgttgtttatcaactttcgtctgcactggcgtgaccggggattaccgttattgttcgcagaaggctttttgctgatggggagcttcgtcacgctgtttaattacatcggctatcggttgatgctctccccctggcatgtcagtcaggccgtggttggcttattaagcctggcttatttgaccggtacatggagcagtcccaaagccggaaccatgaccacccgctatgggcgtggtccagtgatgttgtttagcacgggggttatgctgtttggtttactgatgaccttattcagcagcctgtggctgatctttgccggaatgttactcttcagtgcaggattcttcgcagcccacagtgtagccagcagctggatcggcccccgcgcaaaacgcgctaaaggccaggcctccagcctgtatctgttcagttactatctggggagcagtattgccgggacgctgggtggtgttttctggcataactatggctggaacggcgtcggcgcatttattgctctgatgctggtcattgctctgctggtcgggacgcgtttgcatcgtcgtctgcacgcctgaaaaataagtccggactgcggtaaatacccgtccggacttattgccagctcaaaccaacgttaatagccatcctaaaatagacgaagcgccagccaattcccgcagcgcgtctagcgtcatcaggattataagtacccaaataaacggattcattttgctgtgtgtcatttattactgatgcgcagttattctactgctttgtaagtagtaaaatagttaacccgatcaagactactattattggtagctaaatttcccttaagtcacaatacgttattatcaacgctgtaatttattcagcgtttgtacatatcgttacacgctgaaaccaaccactcacggaagtctgccattcccagggatatagttatttcaacggccccgcagtggggttaaatgaaaaaacaaattgagggtatgacaatgaaaaaagtattagctctggttgttgccgctgctatgggtctgtcttctgccgcctttgctgcagagactacgaccacacctgctccgactgcgacgaccaccaaagcagcgccggcgaaaactacacatcataaaaaacagcataaagcagcacctgcccagaaagcgcaggcggctaaaaagcatcataaaaatacgaaagctgaacagaaagcccctgaacaaaaagcgcaggcagcgaagaaacacgccaagaaacacagccatcagcaaccggcaaaacctgctgcacaacccgcagcgtaagttttcaacagtaatgctggcgcgccccctcgcgcctgaaaattacggtgctaagcgggtaacgtttagcaccgcctttagcggagggtagtatggtgggccgttatcgctttgagttcattctgatcatccttattttatgcgcactgattaccgcccgtttttatctttcctgattgtagttatctgattttactcccactttcatcccgtcccgtctatagtatttatgagggtttgcttttaataatcataattacccaccagagtgtgatatgcgtacaaccattgctgtagtgttgggtgcaattagtttgacgtctgcttttgtgtttgcagataaaccagacgttgccagaagcgcaaacgatgaggtcagcaccctgttttttggtcatgatgatcgtgtgccagtgaatgacacgacccaaagtccgtgggatgcggttgggcaactggaaacggccagcggcaatttatgtacggcgacgctgattgcacccaatctggcattaacggcaggacactgtttattgacacctccaaagggtaaagccgataaagcagtggcgctgcgttttgtgagtaataaaggtctttggcgctatgagatccacgacatagaaggccgcgttgatccgacactgggaaagcggttaaaagcagatggggatggttggattgtacctcccgcagccgcgccgtgggacttcggattgattgtgctacgtaatcccccttctggcattacgccgttgccgttatttgagggagataaagccgcgcttaccgccgcattaaaagcggcaggtcgtaaagtgactcaggcaggctaccctgaagatcatctcgatacgttgtacagtcatcaaaactgtgaagtgactggctgggcgcaaacgagcgtgatgagtcatcagtgcgataccttgccgggtgacagcggtagccctctgatgttgcataccgatgacggctggcaattaattggggtgcaaagtagcgctcctgccgcgaaagatcgctggcgcgccgataaccgggccatttctgttaccggttttcgcgacaagctggatcaactgagccaaaaataatgttcaaacgctgcccgacagcgcgggcagcgtcttcatcaggcaagtttcaccatgatcattccagccaacagcaagaccaggccaatccagcctttacgatttaaccgttgaccaaacaagatccaacctgcggctaacgtggcggcaataccaaacccgccccacaatgcataagcgacagacaagtcgatccctttaacggcttgagaaagcgcactaaaggcagccagcaccgccgccagggagagcaagccaaatattttgcgacgaaagccgtcagaaaatttcaaaaagacgttagcaacgatttccagcacgattgccaatgccagccaggcggcgtgaacccattcaaactgcgccatggttcacctccagttcaggtttacgcgctttacgggtaccactttttatcaacacaatcccggcgaccagggtggttaacccggcaattttcatcaggcttaaactttcgtcgaataacaaaacgctaaacaaggtaataaataaaataccgataccttcccacagcgcataagctacgcctaaggcgatttttttaacggcgaaagagagaaatatatagctcagagaaatcatcaccagcattaaaataaagccgccatttccctcactgacgctcgcccatttcatactcagcgtaccggtaatttctgtagcaatagccagacctaataaaatccaataaatatacattgtccttctcctgcaagagaattattttaattttcgcttaattcagcgaaaccaaagtaaagtggtcaagccccgcgcatagcgcaagctttggcagaagaaaggactaaagcgcgttgcgccagtgctgctcacctacgagcaagatagtggatgaggtacgaagatgggtaaatgtagaaaataacgtcctgaacaaattgtccataatattacaattatccgcagtgttgcttctcgtcatcgcggatgataattgtcctcggtagttgaacacgcctgatttgtatcatagcttaagaattaactcaaaatattttcacttctttacctgagcggtttgattttcgttatgatgacggagcgaaaaagacattattattagcaaaggaagaaaaaacggggacaagcatggcaaagccgatcatcacgctcaatggcctaaaaatcgtcattatgttgggaatgctggtcattattctctgcggtatccgttttgccgccgagatcatcgtgccgtttattctcgcattatttattgctgttattcttaacccgctggtgcaacacatggtccgctggcgtgtgccgcgtgtactggcggtgagcattttgatgaccatcatcgtgatggcgatggtgttgctattagcttatctgggttccgcgctcaacgagttgacgcggacgttaccgcaatatcgcaactctattatgacgccgctgcaagcgcttgaaccgttgttgcaacgcgtagggattgacgtcagtgttgaccagctggcgcattatattgatccgaacgcggcgatgacgttgctcaccaacttattgacgcagttatctaatgccatgagtagtatatttttattgctgctgacggtgctgtttatgctgctcgaagtgccacaattgcccggaaaatttcagcaaatgatggcgcgtccggttgaagggatggcggcgattcaacgtgcgattgacagtgtttctcattatctggtgctgaaaacagccatcagcatcatcaccggcctggtcgcctgggcgatgctcgccgcactcgatgttcgcttcgcttttgtctggggattgctggcctttgcgcttaattacatcccgaatattggtagtgtcctcgcggcaatcccccctatcgctcaggtactggtgtttaatggcttctacgaagcgttgctggtgctggcgggatatctgctgattaatctggtcttcggcaatattctggagccgcgtatcatggggcgtgggctggggctttccacattggtggtatttttgagcttgattttttggggatggttgttaggaccggtgggtatgctgctttccgtgccgttgacaattattgtcaaaattgcgcttgaacaaacagcgggaggtcaaagcatcgccgttctgttaagcgatctcaataaagagtgacggcctcagcagaggccgtcagggttacagagctttcaggattgcatccacgctggctttggcgtcaccaaacagcatgtgggtgttttccttgaagaacagcgggttttgcacaccagcatagccagtgttcatgctacgtttaaagacaatcacgttctgcgctttccacacttccagcacaggcataccagcaatcggactcttcggatcatcctgcgccgccgggttaaccgtatcgttagcaccaatcaccagtacggtatcggtatcagcaaagtcatcattgatctcgtccatttccagcacgatgtcatacggtacttttgcttcagccagcaatacgttcatatgtccaggcaaacgccccgcgaccgggtggataccgaaacgcacattaataccacgagcgcgcaatttctcagtaatttcagcgacaggatattgcgcctgcgcgactgccatgccgtaccccggagtaatgatcacactatgggagtttttcagcagttccgctgtctcttctgcggtgatttcgcggtgctcacccacttcctgatcatcgccagtagaagagccgtcggtgccgaaaccacccgcaataacgctgataaaggaacggttcatcgccttacacataatgtaagaaaggatagccccgctagaaccgaccagcgcaccggtcacaatcagcaggtcgttgctgagcataaagcccgcagccgcagccgcccagccggagtagctgttcagcatgctcaccaccactggcatatctgcaccaccgatggaggcgactaaatgccagccgaataccagcgcaattgcggtcattatcagcaatgccagcacttgcaggccgacgctgtccgtgcgaacaaatacaatcagcagcaggaaggaaacgaccagagccgccaggttcattttgtgacggtttggcagcatcaatggtttagagctaatcttgccacacagtttgccgaacgccaccacgctacccgtgaacgttaccgccccgatgaagataccgaggaacacttccgtcaggtgaatattgaccagaatcggtgccattcccgcgtcatgatgcagatagctgttaaagccaaccagcactgccgccagacccacgaagctatgcaggatcgccaccagttctggcatttcggtcatttcaactttcttcgccagacggataccaattgccccaccaatgaccatcgccagcaagatccagccaacattacccgtatccggtccaaaaatggttgcgattaacgcaatcgccatcccggcgataccgaagttgttaccctggcgagacgtttcatgtttgctaagaccggccagactgaagataaacaggatcgcggcaacaatgtatgcagctgtaactaatcctccagacatatgttaccccttaatttttgcggaacattttcagcatgcgctgagtcacggtgaagccaccgaaaatattaatgctggctataagcaccgcgataaaactaaggaagctaacccagccgccctggccaatctgcaacagtgctccgacaacaataatcccactaatcgcgttggtgacgctcatcaacggtgtatgcagcgcgtggcttacattccacaccacgtaataaccgacaacgcaggccagcgcgaaaacggtgaagtgcccaaggaattctttcggcgcaacgcttgccatccagccaaaaagaatgattgccagcgccatcaacgcgtatttacgccacggactgcaggtacatttttcctcagttttcacttccggtgccgctttttgtgccgcctgcggctgagcacttacctgaatcggcggtgccggccaggtaatttcgcccgcacggatcacggtcacgccgcgaatcaccacatcatcaaaatcaacagtgatattgccgtctttctctttgcacaacagtttcagcagattaacgaggtttgtgccgtaaagctgactggattgcgtcggcagacggcccggaagatcggtataaccaatcactttgacaccattttccgtagtgaagatttcacccggcacggtgtattcacagttgccgccgttttgggctgccaggtcgacaatcacactgcccgccttcatggagtcaaccatttcacgggtaattagcttcggcgctggtttgcctggaataagcgcggtggtgacaatgatatcgacctcttttgcctgggcggcaaagagttccatttccgctttgatgaacgcgtcgctcatcactttggcatagccatcgccgctgccagcttcctctttaaaatccagctcgaggaattccgcgcccatactttgaacttgttctttcacttccgggcgggtgtcgaatgcacgcacaatcgcgccgagactgtttgctgcgccaatggcggccagacctgcaacacccgcaccaatcaccatcacttttgccggtggcactttcccggccgcagtaatttgcccggtaaagaagcgcccaaattcatgtgccgcttcaacaatggcgcgataaccggcgatgttcgccatgctgcttagtgcgtccaggctttgtgcgcgactgatacgcggcacagagtccatcgccatcacggtcacgttacgttccgcaagtttttgcattaattccggattctgcgcaggccagataaaactcaccagcgttgtcccaggattcagtaacgcaatttcatcatctaacggcgcattgaccttcagaatgatctcactctgccagacgctattcccttctacaatttcagcgcccgcttgcacaaacgctttatcgtcaaaacttgccagttgacccgcgccgctctctaccgcgacggtaaaacccagtttcagcagctgttccactgtttttggcgttgctgcaacacgggtttcattggttaaccgttctcttggtatgccaattcgcatgatattcccttccatcggttttattgatgatggtttgcctgtgtcaggagccacacaagctgctcatgtacgagctaaatgttactccgttaaaataaattagtaacaaacgccctataacgtactgaaaattatgcctgtgatctagcgccaaaaatcagtatttcggcgtgaactcgcaaaatattaacgattcagccgtgatagtgggataaacaccttagaacgccggataaagactgataattgtcttcgacggtcgggtaaaacgagacatcgccccggcacgaatcactacttaacattaaattaacttatacaattcagttgcttcagtagtaatgatgctgatacggctgttttttaagcatagacggtcatttgagcaggattaaaattggcttaaggaatgtgatatgaaaaatgacgcagacagttacaccgtttaaatgcaataatcagccacgtttctcgttaataacaataccagtacctggtttgcgcaaggcgaaggattatttttatgaagcttaagaacaccctcctggcgagcgcactgctttctgctatggcattctccgttaacgcagcaacagaactgacaccggagcaagcggcagcggttaaaccttttgaccgtatagtggttaccggtcgttttaatgctattggcgaagcggtgaaagccgtttctcgtcgcgcagataaagaaggtgccgcctctttttatgttgtcgacacttctgattttggtaacagcggtaactggcgtgtggtcgctgacctctataaagccgatgctgaaaaagcagaagaaacaagtaatcgcgtaattaacggtgttgtcgaactgccgaaagatcaggctgttctgattgaaccgtttgacacggtcaccgtccagggcttctatcgtagccagccagaagtcaatgatgccatcaccaaagcggcaaaagcgaaaggtgcctactctttctacatcgttcgtcaaatcgatgccaaccagggcggcaaccagcgtattactgcattcatctataaaaaagatgctaagaaacgtatcgtccagagcccggatgtgatcccggcagattccgaagcaggacgtgcagctctggctgccggtggcgaagccgcgaagaaagttgagatcccgggtgttgcgactaccgcaagtccaagttctgaagtcggtcgcttctttgaaacccagagtagtaaaggcgggcgttacaccgtcacgctcccggatggcactaaagtcgaagaactgaacaaagcgaccgcagcgatgatggtcccgttcgacagcatcaaattctctggcaactacggcaacatgaccgaagtctcctatcaggttgcgaaacgtgccgcgaagaaaggtgctaagtattaccacatcacccgccagtggcaggaacgtggtaataacctgaccgtcagcgcagatctgtataaataactattcagttactcctataaggcggcttgatgccgcctttcgcatttttagtcacaaatttccccgcgaccattgcatgcagacacatctcttcgtaaaatcccgcgcttcagtggcaaactccatttttatgcgttttgccctaatatttattcttcttatcacgttttaatcactggatatcgatggaaaagaaactgggactgagcgcactcaccgcgctggtattaagcagtatgctgggcgcgggtgttttcagtctgccgcaaaatatggcggcagttgccagcccggcagcactgctcatcggctggggtattactggcgctggcattttattgctggcctttgccatgctgatcctcacgcgcattcgtcccgaacttgacggcggtatctttacctatgcccgcgaagggtttggcgagctaatcggcttttgttccgcatggggatactggctgtgcgcagtcatcgccaacgtctcctatctggtgatcgttttttccgcgttaagcttttttacggacacgccggaattgcgcctgtttggcgatggtaatacctggcaaagcatagtcggtgcaagcgctttattgtggattgttcactttttgatcctgcgcggggtgcaaaccgctgccagcattaacctggtggcgacactggcaaaattgttgccgctgggtctgtttgttgtgctggcgatgatgatgttcaaactggataccttcaagctcgacttcaccggacttgcacttggcgtacccgtttgggaacaggtgaaaaacaccatgctgatcaccctgtgggttttcattggtgtggaaggtgccgtggttgtttctgcgcgtgcgcgtaataaacgtgatgttggcaaagcgacactgctggcggttctctccgctctgggcgtttacttgctggtaacgctgcttagcctgggtgtggtggcacgtcctgaactggctgaaattcgtaacccgagtatggccggtctgatggtggaaatgatgggaccatggggcgaaatcatcatcgctgccggtttgatcgtttccgtttgcggcgcgtacttaagctggaccatcatggcagcagaagtaccgttcctggccgccactcataaagcattcccgcgcatttttgcgcgccagaacgcacaagctgcgccatccgccagtctgtggttgaccaacatctgcgtgcaaatttgtctggtactcatctggctgaccggttccgattacaacacgttgctgaccatcgccagtgaaatgattctggtgccctatttcctggtcggcgcgttcttgctgaaaatcgcaacccgtccactgcataaagcggtaggtgtcggtgcctgcatttatggcttatggttattgtacgcctctggtccaatgcacttgctgttatccgttgttctgtatgcaccggggctgctggttttcctgtacgcgcgcaaaacgcatacccatgataatgtactgaaccgtcaggaaatggtgctgattggcatgctgttaattgccagtgttccggcgacctggatgctggtgggataacgttcatcccatcgttggatagcaaaggagataacgatgggtaaaacccagcccttgccaatattaattactggcggaggtcgtcgcatcggcctcgccctcgcatggcatttcattaatcaaaagcaaccggtgattgtcagctatcggacacactatccagccattgatggactgattaatgcaggtgcgcagtgtattcaggctgattttagcaccaacgacggtgtgatggcgtttgccgatgaagtactaaaaagcacccatggtctgcgtgctattttgcataacgccagtgcgtggatggcggaaaaaccgggtgcgccactggccgacgtactggcttgcatgatgcagatccacgttaataccccatacctgctcaaccatgcgctggaaagattactgcgtgggcacggacacgccgccagcgatatcattcactttaccgattatgtggtggagcgcggtagcgacaaacatattgcgtatgctgcaagcaaagcggcactggataatatgacccgcagctttgcccgcaagctggcaccggaagtgaaagtgaattctattgcgccaagcctgatcctgtttaatgaacatgatgatgccgaatatcgacaacaggcgctgaataaaagtctgatgaaaaccgcgcctggcgagaaagaagtgatcgacctggtcgattacttacttaccagttgctttgtcaccggacgcagtttcccacttgatggcggtcgtcatctgcgttaatgcagctttatccagcatataatcaacacccatgcgcttatcccccaacacgcaacagaaccaacaaaagcggcgggcaagcgcatcattccggtgaaataccacaggctcaccaggtaaacaaaatagggaataatgctccacatactaaaaatgatggttgcgcgtaaggcttcaatgccgcgttcgctggcaacaatataatgcgcgataagcgcaaaggtcgggaaaagtggaatcagcccggcgatataataatttttcgtttttgctaaaacaccaatcaacagcactaccagcgcaccgagcgcggctttgattaccagccccatctttttaccttaacacttccataacaagtcatcagtagaatacctgatgaaaacttgtttagaaacgattgatagtaagtaaaaacagcgcggtgtattgtgacgtttttatatctaccgtgaatgttatgaacactatcgtatttgtggaagatgatgcggaagtcggtagtctgattgccgcgtacctggcaaaacatgatatgcaggttaccgtagagccgcgcggcgaccaggccgaagaaaccattttgcgagaaaatccggatttggtgttactcgacatcatgctaccaggcaaggacggcatgaccatttgtcgtgatttacgcgcaaagtggtctggaccgattgttcttctaacctctctcgatagcgatatgaaccacatcctggcactggaaatgggtgcctgcgactatattctcaaaacgacgccccctgctgttttgctagcgcgtttacgtttgcatttgcgtcagaatgagcaagccacactgaccaaaggtcttcaggaaacgtctctgactccctacaaagccctgcatttcggcacgttgaccatcgatcccatcaaccgcgtagtcaccctggctaacactgaaatcagcctcagcacagctgatttcgaattattgtgggaattagctacccatgccgggcaaatcatggaccgcgatgcattgctgaaaaatttacgcggcgtcagttatgacggactggatcgtagcgtggacgtggctattagccggttaagaaaaaaactgctcgataacgccgcagaaccttatcgcattaaaactgtgcgtaacaaaggctatctttttgcgcctcatgcatgggaataagcgatgaaaaaactgtttatccagttttacctgttattgtttgtctgcttccttgtgatgtctctgctggttgggctggtgtacaaatttaccgccgaacgcgcgggcaaacagagcctggatgatttgatgaacagtagcctgtatctgatgcgcagcgaattgcgtgagatccccccacacgactggggtaaaactctgaaagagatggatttaaatctctctttcgatctgcgtgtcgagccactgagtaaataccatcttgatgatatttccatgcaccgactgcgtggcggcgaaattgtcgccctggacgatcagtacacgtttttgcagcgtatcccgcgcagccactacgtgctggcagttggtcctgttccttatctttattatctccatcagatgcgattgctggatatcgccctgatcgcttttattgctatttccctcgcctttccggtgtttatctggatgcgtccgcactggcaggatatgttaaaactggaagcagcggcgcaacgatttggcgatgggcatctcaatgaacgtatccactttgatgagggtagcagctttgaacgacttggcgtcgcatttaaccagatggcggacaatatcaacgccttaattgccagcaaaaaacagcttattgacggtatcgctcacgaactgcgaacaccgttagtgcgcctgcgttatcgactggagatgagcgataacctgagcgccgccgaatcccaggcgttgaatcgtgatatcagtcaacttgaagctttaattgaagagctgctgacttatgcccgactcgatcgcccacaaaacgagcttcatcttagcgaaccagacctgccgttgtggctgagtacgcatctggcagatattcaggcagtaacgcccgataaaacggtacggataaaaacgctcgtgcaaggccattatgcggcgttggatatgcgcttaatggagcgcgtgctggataatttgctcaataacgccctgcggtactgccatagtacggttgaaaccagcctgctactgagcgggaatagagcgacattaattgttgaggatgatggcccagggattgccccagaaaaccgcgaacatatctttgaaccttttgttcgcctcgatcccagccgggatcgcagtaccggcggctgcgggctggggctggcaattgtccactctatagcactggcaatgggcggtacggttaattgtgacaccagcgaactgggtggtgcccgcttcagctttagctggccgttatggcataacatcccgcaatttacctctgcctgacactacgcgcacgatggtcaagtcaccacgactgtgctataaaataagtatgttgtaactaaagtggttaatattatggcgcgttacgatctcgtagaccgactcaacactacctttcgccagatggaacaagagctggccatatttgccgctcatcttgagcaacacaagctattggttgcccgcgtgttctctttgccggaggtaaaaaaagaggatgagcataatccgcttaatcgtattgaggtaaaacaacatctcggcaacgacgcgcagagcctggcgttgcgtcatttccgccatttatttattcaacaacagtccgaaaatcgcagcagcaaggccgctgtccgtctgcctggcgtgttgtgttaccaggtcgataaccttagccaagcagcgttggtcagtcatattcagcacatcaataaactcaagaccacgttcgagcatatcgtcacggttgaaagtgaactccccaccgcggcacgttttgaatgggtgcatcgtcatttgccggggctgatcacccttaatgcttaccgcacgctcaccgttctgcacgaccccgccactttacgctttggttgggctaataaacatatcattaagaatttacatcgtgatgaagtcctggcacagctggaaaaaagcctgaaaagtccacgcagtgtcgcaccgtggacgcgcgaggagtggcaaagaaaactggagcgagagtatcaggatatcgctgccctgccacagaacgcgaagttaaaaatcaaacgtccggtgaaggtgcagccgattgcccgcgtctggtacaaaggagatcaaaaacaagtccaacacgcctgccctacaccactgattgcactgattaatcgggataatggcgcgggcgtgccggacgttggtgagttgttaaattacgatgccgacaatgtgcagcaccgttataaacctcaggcgcagccgcttcgtttgatcattccacggctgcacctgtatgttgcagattaacgcccggctttcatactgccgaccatctgttctggccgtacccagctgtcaaactcggcttcgctaagataccccagcgcaagggccgcagcttttaaggtcagcccttctttatgcgcttttttggcgatctcggcggctttgtcataaccaatgtgggtgttaagcgcagtcaccagcatcaggctttcattgagtaattgattgattcgctcacgattcggttcaatacccactgcgcagtgtttgttaaaactttccatgccatctgccagcaagcgcacgctttgcaggaaattgtggatcaccattggacggaagacgttcagttcaaagttaccggaagcgccccccatgttgatcgccacgtcgttccccatcacctgacagcagagcatggttaatgcctcacactgtgttgggttcactttccccggcatgatactgctgcccggctcattttccgggatactgatttcaccaattccgcagcgcgggccagaggccagccagcggacatcattggcgattttcatcagactcgcagccaaccctttcaacgcgccgtgcgcctgaaccagggcatcacaggtcgccagcgcttcaaatttgttcggcgcggtaacaaacggtgcacaggtaatgactgccagttcatctgctacgcgacgcgcatactccggatgggtatttagtccagtacccaccgctgtaccgccaagagccagttccgctacgtgaggcaggctgtattcgatatgtttgagattatgctcgagcatcgctacccagccggaaatctcctgccccagcgttaacggcgtggcatcctgcaagtgagtacgaccaattttgacgatatcggcaaaagcacgggatttctcattcagtgtctgtgtcagggttttaagctgaggaatgagttgcttgcgcagcgccagcagcgccgcaacgtgcatcgccgtcggaaagacatcgttggaactttggcttttgttcacgtcgtcgttagggtgaactttacgttccatcccgcgcacaccgccgagtaattcactggcccggttagccagcacttcgttcatgttcatgttactttgcgtgccggagccggtctgccagatagccagcgggaattcgtcgtcatgctgtcctgccagtacttcatccgccgcctgacgaatggcgctcgctttctcttcagacaacaagcctaaatcttcattaacttttgccgctgcacgcttggttagcgccagcgcatgaatcagactggtgggcattttctccgtgctaatgcggaaatgctccaggctgcgttgagtttgtgcgccccacagcttatctgccgggacatcaatcgcccccatgctatctttttcgctgcgtactgtattcatgacctgctcctcacctgattaattttttctttctgttttgctttcgttaagcaacttttagctcacttattatttaccatttgataacaaatgtttggtctttcgtgccatgtaaaaaaaccgccccgaagggcggctctgtttatttcacacagcgggtgcattgtgtgagttgtatctgctggaagaagtcatttcctttatcatccacaaggataaacgccgggaaatcttccacttcaattttccagatggcttccattcccagttccggatattcaacacattccaggctcttaatacttccctgcgccaatacagcggccggaccaccgatactgccaaggtagaagccgccgtgttttttacaggcatccgtcacctgctggctgcggttgcctttcgccagcatgatcatacttccgccctgcgcttgcagttgatcgacataagaatccatccgtccggcggtcgttgggccaagagaaccggaggcataaccttccggcgttttggccggacccgcgtagtaaatcggatgatctttgatgtactgcggcagcccttcaccgttatccatccgctctttcagtttggcgtgagcaatatcacgaccgacgataatcgtgccgttaaggcttaagcgtgtagaaacgggatactggctcaactgtgcgaggatctctttcatcggacggttaaggtcaacgcgcaccgcttcgccttctcccgctttgcgcagctcttccgggatatatttgcctggattatgttccagtttttcgatccagatcccctgacggttgatcttcgctttgatattacggtcagcagagcaggagacgcccataccgaccgggcaggatgcgccgtgacgtggcaggcgaatcacgcggatgtcgtgagcgaagtatttaccaccaaactgcgcacccagaccaagattttgcgcttcgatcagcaattctttttccagttccacatcgcggaacgcctgaccgtgctcattcccttccgttggcagttcatcatagtatttcgcggaagccagtttcaccgttttaaggttcgtttctgcagaagttccaccaataacgaacgcaatatgatacggaggacaggccgccgtacccagcgtgcgcatcttctcaaccaggtaatttttcagtttccccggcgtcagtaacgctttggtttcctgatagagatacgtcttgtttgcgctaccaccacctttggcgatacagaggaatttgtattcgtcgccatcaacggcataaagatcgatctgcgctggcagattggtgccggtattcacttctttatacatatccagcggcgcgttttggctgtagcgcagattatcttcgatataagtgttatagacaccgcgcgccagcgccgcttcatcaccaccaccggtccatacacgctgcccttttttaccaacaataatcgcggtgccggtatcctgacaggttggcagaacgcctttcgccgcgatgtcggagttacgcaggaattgcagcgccacatatttatcattttcgctggcctccgggtcacgcagaatgtcggccacctgttgttggtgcgccggacgcagcatgaagctcgcatcatgaaacgcctggcgcgccaacagagttaacgcttcgggtgcgactttcaaaatctcctgcccttcaaattcagatacgctaacgtgttcgctggttagcaggtaatactcagtatcatcttttttgagtggaaaaggagcctgataatgaaagggtttgttactcattgttctctcacttactgcctggtttggttatgctctgggcgggtgttccgttgccctgttaaaagcgagtaacaatatcctacacacttttttaacaaaaactgagactagtacgactttttgcggctccaggttacttcccgtaggattcttgctttaatagtgggattaatttccacattaaaacagggattgatcatgcaaaaactcattaacagtgtgcaaaactatgcctggggcagcaaaacggcgttgactgaactttatggtatggaaaatccgtccagccagccgatggccgagctgtggatgggcgcacatccgaaaagcagtagtcgagtgcagaatgccgccggagatatcgttagtctgcgtgatgtgattgagagtgataaaagcactctgctcggagaggccgttgccaaacgctttggcgaactgcctttcctgttcaaagtattatgcgcagcacagccactctccattcaggttcatccaaacaaacacaattctgaaatcggttttgccaaagaaaatgccgcaggtatcccgatggatgccgccgagcgtaactataaagatcctaaccacaagccggagctggtttttgcgctgacgcctttccttgcgatgaacgcgtttcgtgaattttccgagattgtctccctactccagccggtcgcaggtgcacatccggcgattgctcactttttacaacagcctgatgccgaacgtttaagcgaactgttcgccagcctgttgaatatgcagggtgaagaaaaatcccgcgcgctggcgattttaaaaagcgccctcgatagccagcagggtgaaccgtggcaaacgattcgtttaatttctgaattttacccggaagacagcggtctgttctccccgctattgctgaatgtggtgaaattgaaccctggcgaagcgatgttcctgttcgctgaaacaccgcacgcttacctgcaaggcgtggcgctggaagtgatggcaaactccgataacgtgctgcgtgcgggtctgacgcctaaatacattgatattccggaactggttgccaatgtgaaattcgaagccaaaccggctaaccagttgttgacccagccggtgaaacaaggtgcagaactggacttcccgattccagtggatgattttgccttcagcctgcatgaccttagtgataaagaaaccaccattagccagcagagtgccgccattttgttctgcgtcgaaggcgatgcaacgttgtggaaaggttctcagcagttacagcttaaaccgggtgaaagtgcgtttattgccgccaacgaaagtccggtgactgtcaaaggccacggccgtttagcgcgtgtttacaacaagctgtaagagcttactgaaaaaattaacatctcttgctaagcttattaaaggcttataacaccttcaggcggccagtccgcctgatttcattttatggataatcattatgaataaaagcctggtagcggtaggcgtcattgttgcgctaggcgtagtctggacaggcggcgcatggtatacaggcaagaagattgaaacccatctcgaagacatggtcgcgcaggcgaacgcgcaactcaaactgacagctcctgaatccaacctggaagtgagttatcaaaactatcatcgcggcgtattcagcagccagttgcaactgttggtgaaacccattgccgggaaagaaaatccgtggattaaaagcggtcagagcgtcatcttcaacgaaagcgttgatcatggtcccttcccgcttgcccagcttaaaaaactgaacctgatcccgagcatggcaagtattcaaaccacgctggttaataacgaagtaagcaaaccactgtttgatatggcaaaaggtgaaacgccttttgagattaacagccgcattggttacagcggtgattccagttccgatattagcctcaagccactgaattacgagcaaaaggatgaaaaagtcgcctttagcggcggcgagttccagttaaatgctgacagagacggcaaagccatctccctttccggggaggcgcaaagtggtcggatagacgcagttaacgaatacaaccagaaagtgcagttgacctttaataatctgaaaaccgacggttccagcacgctggcaagttttggtgagcgtgtaggaaatcaaaaactgagtctggaaaaaatgaccattagtgtggaaggcaaagaactggcactgctggaaggcatggagatcagcggtaaaagcgatctggtcaatgacggtaaaacgatcaatagccaactggattacagcctaaacagcctgaaggtacagaatcaggatctgggcagcggcaagctgactttaaaagtcggccagattgatggtgaagcctggcatcagtttagccagcaatataacgcgcaaactcaggcgctgctggcacagccagaaattgccaacaaccccgaactttatcaggagaaagtgacggaagccttctttagcgccctgccgctgatgctgaaaggcgatccggtgattactatcgcgccgctaagctggaaaaacagtcagggtgaaagtgccctgaatctgagcctgttcctgaaagatccggcaacgactaaagaagcgccgcaaacgctggcgcaggaagtagatcgtagcgttaaatctctggatgcgaaactgaccattccggtggatatggcaactgagtttatgactcaggtagcgaagctggaaggttatcaggaagatcaagcgaaaaaactggcgaaacagcaagttgaaggtgcaagtgcaatggggcagatgttccgtctgaccaccttgcaggacaataccatcaccaccagcctgcaatatgctaacggtcagataacgttaaatgggcagaaaatgagcttagaagattttgttggcatgtttgcgatgccagctcttaacgttccggctgtaccggcaattccgcagcagtaattcacggccaaaacgccggagaattttcactccggcgttttcatctgaaaacaaaccagagattgcctgatgcgctacgcttatcaggcctaccttttcctgcaacactttgaatttatgagtttttgtaggctggataaggcgtttacgccgcatccggcataaaaaacgcgcactttgtcaacaatctgaaacgccggagatttttctctccggcgttattttttacttcagcataaagtcatactgaatactcattttcacatcccagtaattcaggcgatcgcccagcgtactgccatcgcgcttttcccgccctttatcggcagcaagaaagaaattcatcccttgtaacggcccttcgctgacccgatagttcataccacctaagatacccgtgccttcaatccgcacatctcgtttactggattcatagccgcgagtcacaatcggtgcaaatgtcagcgtaaattgcggcgttaaacgatagttgacgcccaattgccaggactgcattccttcacggttacgatcaagacttaaactaaagggatagccaatgtcggtatccaccacggcaccattcattgcatggcgcaaataaccaccactgccaaatacacttccccacggcgcattccaggtcaattgtccactaaccaacgccgtttcattgggctggctggtattacgacttaaaccttcgagctgcgcgtaaaagccgagcaactcccctttcaacgtataattcgggtcgagcggtatgcttttctcgagaatactttgtatctgattggaaacatctttctgtacgcttgcccccagagaatagcgactggtatcatcatgccaactggcggctaaaaaagaacgtgcgcgatgtttatcgtattttcccgtctggctgttatacaccccttcatcacgaataccggttgtactatcagtccataaaaatactcgactacgccacattccccacagatcaatatttggtgttaaagcccaataacctaatgctccttcagaaactgtcggtaatgtacgttggctactgccagccattaacggaatacgataaggtaagctaccataactataatccgtcccgaagcgacctaatttaagcaggctattttcactgggttttatttttactgcccccagggcaaagccaaaacttttatcaccatcaagataccaccgggtactcatatcagcacgagcacctaatttataaacataatacgccccgccttcaacgccaataatattggaataataaccactattgaaatcgagcaatcctccctgtacccatgcgtaaatatctcttcccgcgccagcactgggcttatccgccctgcgcaattcgtttttcagtctgatgcgtagtcccgcttcatcgtcagccagttgcgccgcataagcagaggtaaggccagaggcagccgtcaggcaaataacggccatggccactatttttctcatagttgcacctttgatgttctgattatttttattgaatattaattagtgatatcgctgattaattgctgctgcacttttttacgattatcaatttcaaccacgatttctttgaattttttatccgtgagcggataaaaccagataataacgaatgccagtagcataaatccgcaaggtactaaggcaatacttgtgcggatgcccataataacttccggcgtttgcacctgattggcgatatatccgcttaaccccaaaataaaggcaggaatactacctccgattgcctgaccgcatttacgggtaaaactgaatagactataggtgagcccttcaattcgcacgccggtcaggtattcaccgtattctacggtatcagcttccagcgcccacatcacggtcatggtaacgccctgaccaatactagcgatggccaacgcaaccaacgccaccggcagactccagacggaaacccagaagaacagcagataaccgcaggttcccagcaaagcgccaatcaggaaggtattctttttaccgatcctcgcgaccatccccggcaccagcggtgcgcttgccacagtaccaaccaggttttgcaccagtaccagcacagtgaacagcccggtatcatttaacacatagcgcacgtagaacaagctgctggcgctgaccgcaaaggtgctaatcagcacacacagcgcaccgatgcacaacataaacagcgggcgattccgtttcagggtttgcagactgatattcaaactcggctgcgcaacgatacgtaccacattctcacgcgtgcttttgaagcagatgaagtaaagcaccattccggcaatcgccagcacaattgtccagaaatggtatacgctcaccatctcttccgggctggagttcttaatgctcggtcctatcagaaatgccaggcagacaaaggtcaaactagcggcaatcccacgagccgcgcccagacgggcgcgggattgtggttgttgggtcatcgcggtagcaagactaccataaggaatattcaccaggctgtagcaaagcccgaggcccatgtaggtcaaatatgcatacaccactttgctaccatggctccagtcggtcagcacccagaataccagcacgctgaagatcattaacggcgcagtaccgaagagtaaaaacgggcggaattttccccagcgggtattcacactgtccaccactcgtccggcaaagacgtcggcgaaggcatcgaatacccgcaccagtaacagcatggtgcccgccgcagcggcaccgacgccagcgacgtcggtgtagtaactcaacaggaagagcgcccccattgcgaaggcgaagttattggcgacgtcaccgaggctgtagccgacgatggtgcgccaggagagttgttgattcattgtttgcctccctgctgcggtttttcaccgaagttcatgccagtccagcgtttttgcagcagaaaagccgcgctcttcggtttgcggtcgcgagtgaagatccctttcttgttaccgccaacgcgcaatatgccttggctggtcgcaaaatcggcgaaattccatacctgttcaccgacgacggcgctgacgcgatcaaagacgcggtgatacatatccagccatgcacactgatactcttcactccacatgtcggtgtacatactgtgcagcccggctaacgtatccacgccgtattcggtgatgataatcggctgatgcagtttctcctgccaggccagaagttctttttccagtaccttctctgccgtttccaaatcgccgctttggacataccatccgtaataacggttcaggcacagcacatcaaagagatcgctgatggtatcggtgtgagcgtcgcagaacattacattgacgcaggtgatcggacgcgtcgggtcgagtttacgcgttgcttccgccagtggcgcgaaatattcccgtgcaccttgcggacgggtatccggttcgttggcaatactccacatcaccacgcttgggtggtttttgtcacgcgctatcagctctttaatcgcctgtaagtgcgcttgctgagtttccccgttgactgcctcttcgctgtacagttctttcggcttgttgcccgcttcgaaaccaatgcctaaagagaggttaaagccgacagcagcagtttcatcaatcaccacgatgccatgttcatctgcccagtcgagcatctcttcagcgtaagggtaatggctggtacggtaggagttggccccaatccagtccattaatgcgtggtcgtgcaccatcagcacgttatcgaatcctttgccacgcaagtccgcatcttcatgacgaccaaagccagtaaagtagaacggtttgtggttaatcaggaactgttcgcccttcactgccacactccggatgccgacgcgaagcgggtagatatcacactctgtctggcttttggctgtgacgcacagttcatagagataaccttcacccggttgccagaggtgcggattcaccacttgcaaagtcccgctagtgccttgtccagttgcaaccacctgttgatccgcatcacgcagttcaacgctgacatcaccattggccaccacctgccagtcaacagacgcgtggttacagtcttgcgcgacatgcgtcaccacggtgatatcgtccacccaggtgttcggcgtggtgtagagcattacgctgcgatggatcccggcatagttaaagaaatcatggaagtaagactgctttttcttgccgttttcgtcggtaatcaccattcccggcgggatagtctgccagttcagttcgttgttcacacaaacggtgatacgtacacttttcccggcaataacatacggcgtgacatcggcttcaaatggcgtatagccgccctgatgctccatcacttcctgattattgacccacactttgccgtaatgagtgaccgcatcgaaacgcagcacgatacgctggcctgcccaacctttcggtataaagacttcgcgctgataccagacgttgcccgcataattacgaatatctgcatcggcgaactgatcgttaaaactgcctggcacagcaattgcccggctttcttgtaacgcgctttcccaccaacgctgatcaattccacagttttcgcgatccagactgaatgcccacaggccgtcgagttttttgatttcacgggttggggtttctacaggacgtaacataagggactcctcattaagataataatactggtcaacctttaatctgattagttaaccaattctgtgttgcacacagttatctgtgagaaacccatggaagagaaatggaaataaaaagaactgacaccgcgatcaaaaaaccaaaaactgcaatacccacagcgtgatatagatcgcattaatctttaaaacagcgttgacagaagccataaaataagcaaccgaacgttcgttcgagcgtattgggaacgataaactctcatgacatatggctacagtgaatattttggggggaattctccgaagccgggaaggataatttttgcacagagaaattacgatatgaaacgcgggcacagttatcaccagcccgccgaaaaagagagagaatcaggatgcggttaagataccgccaatcatcgcgcgtaatccctgagcaaagctcgcttcacgcgccaggtcttccgcttcgatatcggccagtacaccgtaggtcagatccagcagtaaacgactagtcattgccgtgttgatgtctgggcttatctcgcctttttgctgggcatcacgcatccgctgggcaacaaattccgtgatcgtcatatgcttatttttaagcatggcggcgacctgtgggttacgcatcccttccgccataatttcaaccaccagcgcccgttgtccaaaggcttcatgggtgagagagacaatggactcgaccatatagtcaacgaaatgaatcccttcaatcggttcccggaaacgggccagcgccctctcctggtcctgtaagataatcgcctgaatcaaggcttctttggagatgaaatggtgatagagcgtcccgggactaatggcgcaagatttacagatggctttcatgctggcactgtgaaatccattttcactaaaaatctctctggcagcattgaggatccgggtccgtgtcggttgtgcttcagtctgcatgttatccatcattaaaccattatagttagcgtgaataactagtttaccgcgttgtcaggtgagcgcctatcattgctgttgaatagtgcgaaggcacactctattcgtatacttttcactctgaaattggttaaccaatagccgtgatttggctgccagttatttagcagagacgttgatgagtttatcccggtaaacaacacgcacggttgtttaccggtccgttagtgtattaattgagctcctgtaccccaccaccggagacggtgagaatttgtccgcttacccagctcgcagcagggctgcaaaggaacagcgctgcgttagcaatatcttgcggttggcccagacgtctgatcggcgtgtgctgtaacattttttgttcaatttctggtgtaataacggatttcagggcatcggttaatattgcccccggcgcaatgccatttacccgaatatttttttcacccaggtcaaacgccatatttctgaccagatgactggccgcagctttagaacttgcataggaagtcatgtttatatttttattttctgccgccatagaagtgatggtcagaataacgccaccgccatttttttccatttctggcgcaacaagttgactcagatggaaaaaagaaaacacattcagttcataagcacggcgaaaatccgccattggcatatcaaacggtttaggtccaccgccaccggcgttgttaaccagaatatcaactttacccagcttactgatagcaaagtctgccagtgcagagagttcctgttcggaagtaatatcacaacggcaggcaaatgcctgaccacccagttgttgaatttcgtctacaacatggttagctgcgtcggcgttaatatcactgaccaccacagatgcgccagctgtcgcgaatgtaatggcgatttctttaccaatacctgcacccgcacctgtgatgatggcgcattttccgtcgagtctcaggttgtcagaattaaacacataaacctcctgtgaacttcagtaaaaataaaaggcaccgcctgtgtgccacattttttatcattaaccttgaggaaaggacactaccaggtatagcagataaagagaggattatttcgctgcaatgagccgggcgggaataataagattgcgactatgcgtctcttcatgggtgattttttgcatcatgcgatccgcaagtgtgataccaagttcccgcgctggcgtgctggcccaggtaacaggtatatcatcaagtgtggttggtgtcgcatcggtaaatgccgccaggctaacctgttgctcaaagtaacgatcgactccgctttccccgctttgccgccctgctttgagcaaaccaaaccatgcccccatcgcaatagtttcgttatagcaaaccacggcactgatggtcgggttatgacgtaaaagcgccgtgatagcttccgcggcttgcttctggctggaagtgcactccaacacccaatcgctatgaaacggcaggccaaattttagtagagttgcacaatagcccccaacccgttctgcacgggttaaactggaactttgccctcccagccaggcgatccgctgatgcccattgcgaatgagatgctccgtcaacaactgtgcagcctgcatgttgtccgggcgaaccgtatcaacatcatcaagataactggcacgggaagcgaaaatcaccgggatagctttttcttctgccatccgtcgcaggtcatcgctacttcctgcagctccggcaattaccacaccatcgacaccctgattcagtaacagactaaaccgctgtgccagctgctcaccgtctttaccgccgtgaagcaaaaaaaccatccgtccctgcgcttccagagcttccgtcaatccggccgtcaattcggcgtaaaacggcgcagataaatcacggacgatcaaaccaatgacgccgctttgcccgccgcgcagcgcgctcgcctggcgattgcgcacaaatcccagctcttcaatggcggcgttaacgcgttctcctgtggcggtagagattcgccctttgccactaagcaccaggctaacggtacttacgctcacgcccgcagccagcgcaacatcatgaatggttatttttttggcggtagccatgcagatgacctactccctgattatgtgacagataaaacgttttaccttttatttatcttatacccgctattatcgttgcgtaatgtgatttatgcctcactaaaatttgataaaacgttttatcttctcgcgcaatttactgaatccagattgttctctacgaggagtcgttttatgacggcgaaaacagcaccgaaagtcacgctgtgggagttcttccagcagttaggcaaaaccttcatgttacccgtggcattattgagcttctgcggcattatgctcggcattggtagttctcttagcagccatgatgtcataaccctgatcccggtcctgggcaaccccgtgttgcaggctatctttacctggatgagtaagattggcagctttgcttttagtttcctgcctgtcatgttctgtatcgccatcccgctgggcctggcacgcgaaaataaaggcgtagcggcattcgctggcttcatcggttatgcggtaatgaacctcgcggtaaacttctggttgaccaataaaggcattctgccaaccacggatgccgcggttctgaaagccaataacatccagagcattcttgggatccagagcatcgataccgggatcctcggtgcggtgatcgccggtattatcgtctggatgctgcatgagcgtttccataatatccgcctgccggatgcgctggcattcttcggcggtacgcgcttcgtaccaattatctccagcctggtgatgggccttgtcggcctggtgattccattagtctggccgattttcgccatgggtattagcggcttgggccatatgataaacagcgcgggtgatttcggaccgatgctgtttggtaccggtgaacgtctgctgttgccgtttggtctgcatcacattctggtggcattaattcgctttaccgacgcaggcggcacgcaggaagtctgcggtcaaaccgtcagcggcgcactgaccatcttccaggcgcaattgagttgcccgaccactcacggtttttctgaaagcgccacgcgtttccttagccaaggtaaaatgcctgcgtttctcggcggtctgccaggtgcagcgttagctatgtatcactgcgcgcgcccggaaaatcgccataaaattaaaggtctgctgatttctggcctgatcgcctgcgtcgttggcggcactaccgaaccgctggaattcctgttcctgttcgtagcgccagttctgtatgtcatccacgcgctgttaaccggcctcggcttcaccgtcatgtctgtgctcggcgtcaccatcggtaataccgacggcaatatcatcgacttcgtggtgttcggtattttgcatggtctgagtaccaagtggtacatggtgccagtggtggcggcaatctggtttgtcgtttactacgtcatcttccgtttcgctatcacccgcttcaatctgaaaaccccggggcgcgatagcgaagttgccagcagtatcgaaaaagccgttgccggtgcgccgggtaaaagtggttacaacgttcctgcaatcctcgaagcattaggcggtgccgacaatattgtcagcctcgataactgcattacccgtctgcgtttgtctgtgaaagatatgagccttgttaatgtgcaggcactgaaggacaatcgggcaattggcgtagtacaacttaatcaacataacctgcaggttgttatcgggccacaagttcagagtgtaaaagatgaaatggccggtctgatgcatactgtccaggcataaggataagatatgttcgattttagtaaggtcgtggatcgtcatggcacatggtgtacacagtgggattatgtcgctgaccgtttcggcactgctgacctgttaccgttcacgattagtgacatggattttgccactgccccctgcattatcgaggcgctgaatcagcgcctgatgcacggcgtatttggctacagccgctggaaaaacgatgagtttctcgcggctattgcccactggttttccacccagcattacaccgccatcgattctcagacggtggtgtatggcccttctgtcatctatatggttagtaaactgattcgtcagtggtctgaaacaggtgaaggcgtggtgatccacacacccgcctatgacgcattttacaaggccattgaaggtaaccagcgcacagtaatgcccgttgctttagagaagcaggctgatggttggttttgcgatatgggcaagttggaagccgtgttggcgaaaccagaatgtaaaattatgctcctgtgtagcccacagaatcctaccgggaaagtgtggacgtgcgatgagctggagatcatggctgacctgtgcgagcgtcatggtgtgcgggttatttccgatgaaatccatatggatatggtttggggcgagcagccgcatattccctggagtaatgtggctcgcggagactgggcgttgctaacgagcggcagcaaaagtttcaatattcccgccctgaccggtgcttacgggattatagaaaatagcagtagccgcgatgcctatttaagcgcactgaaaggccgtgatgggctttcttcccctagcgtactggcgttaactgcccatatcgccgcctatcagcaaggcgcgccgtggctggatgccttacgcatctatctgaaagataacctgacgtatatcgcagataaaatgaacgccgcgtttcctgaactcaactggcagatcccacaatccacttatctggcatggcttgatttacgtccgttgaatattgacgacaacgcgttgcaaaaagcacttatcgaacaagaaaaagtcgcgatcatgccggggtatacctacggtgaagaaggtcgtggttttgtccgtctcaatgccggctgcccacgtagcaaactggaaaaaggtgtggctggattaattaacgccatccgcgctgttcgttaaccccaattgcgcaacgtaaaaaatcgttgcgcaatcgtggatttttaccctgctttgtttttataatggtgcgcacttttatatccagaaaaagagtgcgaccatgattgataccaccctgccattaactgatatccatcgccaccttgatggcaacattcgtccccagaccattcttgaacttggccgccagtataatatcagccttcctgcacaatccctggaaacactgattccccacgttcaggtcattgccaacgaacccgatctggtgagctttctgaccaaacttgactggggcgttaaagttctcgcctctcttgatgcctgtcgccgcgtggcatttgaaaacattgaagatgcagcccgtcacggcctgcactatgtcgagctgcgttttagtccaggctacatggcaatggcacatcagctgcctgtagcgggtgttgtcgaagcggtgatcgatggcgtacgtgaaggttgccgcacctttggtgtgcaggcgaagcttatcggcattatgagccggaccttcggcgaagccgcctgtcagcaagagctggaggcctttttagcccaccgtgaccagattaccgcacttgatttagccggtgatgaacttggtttcccgggaagtctgttcctttctcacttcaaccgcgcgcgtgatgcgggctggcatattaccgtccatgcaggcgaagctgccgggccggaaagcatctggcaggcgattcgtgaactgggtgcggagcgtattggacatggcgtaaaagccattgaagatcgggcgctgatggattttctcgccgagcaacaaattggtattgaatcctgtctgacctccaatattcagaccagcaccgtagcagagctggctgcacatccgctgaaaacgttccttgagcatggcattcgtgccagcattaacactgacgatcccggcgtacagggagtggatatcattcacgaatataccgttgccgcgccagctgctgggttatcccgcgagcaaatccgccaggcacagattaatggtctggaaatggctttcctcagcgctgaggaaaaacgcgcactgcgagaaaaagtcgccgcgaagtaacaaaatggatggtgcaaatgcaccatccatttttcatgcaaggcacaaagtcgcgcgatgtttggcggattcgatgcccagctcaatcaactccattacctggattgcctggcttgccggaaccggattttcaccatcgccatttaacgcatcacgaatagccgcatagtaagccggataattcccaggcaccgtcaacagcgtttcttcgacacgttcctcaccttccacgcgggtaagtacgccatcacgcatatcgtagccccagtcttcctgcggtagacgctcgccatttttcagacgttcttcctgtggatcgaggccatatttcacataactgcctcgggatccatgcacgatataccgtgcactctcagcggctgccagcatggtaccgtgtaaaatgactcgccgctgtggataggacaagatggcgtggaaataatcggtgctctgcgctccgggccgtaactgtgccaaatctaccgtcatgctgaccggtaaaccaaaaagcgtaatggcctgatcaagaagatgtggtgctaaatcgtaccagataccgctgcctgggccgccctgttcacgccaacgatcgcgcacctgcggacggaagcggtcaaaatgagactcaaagtaagcaacttcacccagcacgccttccgcgagtaaaccttttagcgtcaagaaatcgctatcccagcgacggttatggaatacagacagcacacgccccaggctttttgccagcgcatccagctctcgcgcttgactcagtgtcacggtaaagggtttatcaacgaccacatgtttacccgcctcaagcgccgctttggctaacgggaaatgggtatcgttgggtgtaggaatgacaatcaggtctatgttgggatcgttaaacagatgcttcggctcagagacaaccgtaaccgttggccagtcggcttttacttttgtttcatcactgctggagattaccgccagttcctgcccgggcgtgcccgcaatcaggggcgcatggaaggttttgctcgcataaccatacccaatcaacccaacacggatgttgtcgctcatgtcattgcctctcattgaagtatgatggctatttgacactatcctttacccacgctcaacagtttaataacctgccagcaataagggatgttgtttaacttaagtcaaaaaaatagcgaattttccaacgacaaaagctaaatatcgcaaaaacctcagtaaaaatcttgctggagctattattgctaagtaacatttaccccctgaagttaatggatcaatcaagagagatgtgggctgtaatgaatcgtcttattgaattaacaggttggatcgttcttgtcgttagtgtcattcttcttggcgtggcgagtcacattgacaactatcagccacctgaacagagtgctagcgtacaacacaagtaagctctgcacttgtggagcgacatgctgcccgtccgggtgcatgttttcacttgtcggatattaaaccaggaatttattatcttgttcgatgttgttggtgattgtcagggatagtaaagcgcgttactcttttcagagcagtttttcatccctgaatatttgccatcagcgcattcttattattgtaataacacaagcgttcacttttggtgaaattttatcatcactaataatacctacccctttggtattaattattttatggaccttttatgactgttcaggactacttattaaaatttcgcaaaatcagtagtctcgaaagtctggaaaaactctacgaccatcttaattacaccctgacggacgatcaggaactgatcaatatgtatcgtgctgccgatcaccgtcgcgcagagctggtttctggcgggcgtttgtttgacctcggccaggtaccgaagtccgtctggcactatgtccaataaagaaagtagcgatcggttataaaagccttataataacgcccctaaaattagatttgcctgtttgcgtcgctattctggagaacctatgaccaccacaacgccacaacgtattggaggctggttgcttggcccgttggcctggcttttagtcgctctgttgagtacgacgctggcgttgttgctgtataccgctgcgttatcttctccgcaaacatttcaaacgctcggcggacaagcactgacgacacaaatcttatggggcgtttcttttattaccgctatcgccttgtggtattacacactgtggttgaccatcgctttctttaaacgtcggcgttgtgttcctaaacactatattatctggctgcttatttccgtattgctggcagtaaaagcattcgcttttagtcccgtggaagatggcatagccgttcgccagttgctgtttactttgttggcaaccgcattgatcgtcccctatttcaaacgcagcagccgggtaaaagcgacgtttgtgaatccgtaataaccttacagttaacctgttgtcgcctgctctggattaacggataataggcggcttttttatttcaggccgaaaaatgactgactacctgttactgtttgtcggaactgtactggtcaataactttgtactggtcaagtttctcggtctctgtccgtttatgggggtttccaaaaaactggaaaccgcgatgggcatggggctggcaacaacgtttgtgatgacgctggcgtctatttgcgcctggcttatcgatacgtggattttgatcccacttaatctgatttacctgcgcaccctggcatttattctggtgattgctgtggtcgtgcagttcaccgagatggtggtgcgcaaaaccagcccggtgctttaccgtctgctggggatttttttgccgcttatcaccaccaactgtgcagtgctcggcgtggcgttgctgaatatcaatctcgggcacaatttcttgcagagcgcgctgtacggtttttccgccgctgtcggtttcagcctggtgatggtgctcttcgccgccatccgcgaacgccttgctgtggctgatgtcccggcaccttttcgcggtaatgccattgcgttaattaccgcaggtcttatgtctctggcctttatgggctttagtggtttggtgaagttgtaatgaatgctatctggattgccgttgccgccgtgagcctgctgggcctggcgtttggcgccattctgggttatgcctcccgccgttttgcggtggaagacgatccggtcgttgagaaaattgacgaaatcttaccgcagagccagtgtggtcagtgcggttatcccggctgtcgcccctacgcggaagccatcagctgtaacggtgaaaaaatcaaccgttgcgccccaggtggcgaagctgtgatgctaaaaattgccgagttgcttaatgtcgagccgcagccgctggatggcgaagcgcaagagataacgcctgcgcggatggtggcggttattgatgaaaataactgtattggctgcactaaatgtattcaggcgtgtccggtagacgccatcgttggcgctacccgtgccatgcatacggtaatgagtgatctctgtacgggctgcaatttatgtgttgatccgtgcccgacgcactgcatcagcttgcaaccggtcgcagaaacacctgactcctggaaatgggatctgaacaccattcccgtgcgtatcattcccgtggaacaccatgcttaagttattctctgcattcagaaaaaataaaatctgggatttcaacggcggcatccatccaccggagatgaaaacccagtccaacggtacacccctgcgccaggtacccctggcgcagcgttttgttattccactgaaacagcatattggcgctgaaggtgagttgtgcgttagcgtcggcgataaagtattgcgcggccagccgcttacccgtggtcgcggcaaaatgctgcctgttcacgcgcccaccagcggtaccgttacggctattgcgccccactctacggctcatcctagtgctttagctgaattaagcgtgattattgatgccgatggtgaagactgctggatcccgcgcgacggctgggccgattatcgcactcgcagtcgcgaagagttaatcgagcgcatacatcagtttggtgttgccgggctgggcggtgcaggattcccgacaggcgttaaattgcagggtggcggagataagattgaaacgttgattatcaacgcggctgagtgcgagccgtacattaccgccgatgaccgtttgatgcaggattgcgcggctcaggtcgtagagggtattcgcattcttgcgcatattctgcagccacgcgaaattcttatcggcattgaagataacaaaccgcaggcgatttccatgctgcgcgcggtgctggcggactctaacgatatttctctgcgggtgattccaaccaaatatccttctggcggtgctaaacaattaacctacattctgaccgggaagcaggttccacatggcgggcgtagttccgatatcggcgtattaatgcaaaacgtcggcactgcttatgcagtgaaacgtgccgttattgatggcgagccgattaccgagcgtgttgtaaccctgactggcgaagcaatcgctcgcccgggcaacgtctgggcacggctggggacgccagtgcgtcatttattgaatgatgccggattctgcccctctgccgatcaaatggtgattatgggtggcccgctaatgggctttaccttgccatggctggatgtcccggtcgtaaagattaccaactgtctgttggctccctctgccaatgaacttggcgaaccacaggaagaacaaagctgcatccggtgtagcgcctgtgctgacgcctgccctgcggatcttttgccgcaacagttgtactggttcagcaaaggtcagcaacacgataaagctaccacgcataacattgctgattgcattgaatgtggggcttgcgcgtgggtttgcccgagcaatattcccctggtgcaatatttccgtcaggaaaaagctgaaattgcggctattcgtcaggaagaaaagcgcgccgcagaagccaaagcgcgtttcgaagcgcgccaggctcgtctggagcgcgaaaaagcggctcgccttgaacgacataagagcgcagccgttcaacctgcagccaaagataaagatgcgattgctgccgctctggcgcgggtgaaagagaaacaggcccaggctacacagcctattgtgattaaagcgggcgaacgcccggataacagtgcaattattgcagcacgggaagcccgtaaagcgcaagccagagcgaaacaggcagaactgcagcaaactaacgacgcagcaaccgttgctgatccacgtaaaactgccgttgaagcagctatcgcccgcgccaaagcgcgcaagctggaacagcaacaggctaatgcggaaccagaacaacaggtcgatccgcgcaaagccgccgtcgaagccgctattgcccgtgccaaagcgcgcaagctggaacagcaacaggctaatgcggaaccagaagaacaggtcgatccgcgcaaagccgccgtcgaagccgctattgcccgtgccaaagcacgcaagctggaacagcaacaggctaatgccgagccagaacaacaggtcgatccgcgcaaagccgccgtcgaagccgctattgcccgagccaaagcgcgcaaacgggaacagcaaccggctaatgcggagccagaagaacaggttgatccgcgcaaagctgccgtcgaagcggctattgcacgcgccaaagcacgcaagctggaacagcaacaggctaatgcggtaccagaagaacaggttgatccgcgcaaagcggcagttgccgcggctattgcccgcgctcaggccaaaaaagccgcccagcagaaggttgtaaacgaggactaaatggtattcagaatagctagctccccttatacccataaccagcgccagacaagccgcattatgctgttggtgttgctcgcagccgtgccaggaatcgcagcgcaactgtggttttttggttggggtactctcgttcagatcctgttggcaagcgttagtgctctgttagccgaagctctcgtactcaaactacgcaagcagagcgtagccgcagcgttgaaagataacagtgcattgctgacaggcttattgctggcggtaagtattccccccctcgcgccatggtggatggtcgtgctgggtacggtgtttgcggtgatcatcgctaaacagttgtatggcggtctgggacaaaacccgtttaatccggcaatgattggttatgtggtcttactgatctccttccccgtgcagatgaccagctggttaccgccacatgaaattgcggtcaacatccctggttttatcgacgccatccaggttatttttagcggtcataccgccagtggtggtgatatgaacacactacgcttaggtattgatggcattagtcaggcgacaccgctggatacatttaaaacctctgtccgtgccggtcatagcgttgaacagattatgcaatatccgatctacagcggtattctggcgggcgctggttggcaatgggtaaatctcgcctggctggctggcggcgtatggttgctatggcagaaagcgattcgctggcatattcccctcagcttcttagtaacgctggcgttatgcgcaatgttgggctggttgttcagtccagaaacactggcagcaccgcaaattcatctgctgtctggagcgaccatgctcggcgcattctttattttgactgacccggttaccgcttctacgaccaatcgtggtcgtcttattttcggcgcgcttgcgggcttattagtctggttgatccgcagtttcggcggctatcctgacggcgtggcttttgccgtcctgctggcgaacatcacggttcctctgatcgattactacacgcgtccgcgcgtctacggccatcgcaaagggtaaaccatgctgaaaactatccgaaaacacggcattacgttggcgctatttgcagcgggtagtacagggttaactgcggccatcaaccagatgaccaaaacgacgattgctgaacaggccagtctgcaacaaaaggcgttatttgatcaggtgctgccagccgaacgctataacaatgcgctggcacagagttgctatctggtaactgcgccagagttaggtaaaggtgagcatcgggtttacatcgccaaacaggatgacaaaccggtagccgccgttctggaagcaaccgcgccagatggctattccggtgcgattcagctgctggtgggagccgattttaacggcacggtacttggcacgcgcgtgacagagcaccacgaaacgccagggcttggcgataaaatcgaactgcgcctttctgactggatcacccattttgcgggtaaaaaaatcagtggtgcagatgatgcgcactgggcggtgaagaaagatggtggtgatttcgaccagttcaccggcgcgacgattactccccgcgcggtggttaatgcggtaaaacgcgccggattgtacgctcagacgttaccggcacaactttctcaacttcctgcctgtggagaataaagcgtgagcgaaattaaagacgttattgttcaggggttgtggaaaaacaactctgcgctggtccagttgctcggcctttgtcctctgttggcggtcacgtccactgccactaacgctctgggtttaggacttgcgactacgctggtactgacgctgaccaacctgaccattagcacgctgcgtcactggacgccagccgagatccgcattcccatttacgtgatgatcatcgccagcgtggtcagcgctgtacagatgctgatcaacgcctacgcctttggcctgtatcaaagtttagggatttttattccgctgattgtcactaactgtatcgttgtgggccgcgctgaagccttcgccgccaaaaaaggtccggcgcttagcgcactggacggctttagtattggtatgggcgcaacctgcgccatgttcgtgctgggtagtctacgcgaaattatcggcaatggcacattgtttgacggtgcagatgcgctgttaggtagctgggcaaaagtattacgcgtggagattttccacaccgactcccctttcctgctggcgatgctgccaccaggtgcatttattggcctgggactgatgctggcaggaaaatacctgattgatgaaagaatgaaaaagcgccgtgctgaagcagctgcagaacgtgcattgccaaacggtgaaacagggaatgtctgatgaataaagcaaaacgcctggagatcctcactcgcctgcgtgagaacaatcctcatcccaccaccgagcttaatttcagtagcccttttgaattgctgattgccgtactgctttccgctcaggcgaccgatgtcagtgttaataaggcgacggcgaaactctacccggtggcgaatacgcctgcagcgatgcttgaactgggcgttgaaggggtgaaaacctatatcaaaacgattgggctttataacagcaaagcagaaaatatcatcaaaacctgccgtatcttgctggagcagcataatggcgaggttccggaagatcgtgctgcgcttgaagccctgcccggcgtaggtcgtaaaacagccaacgtcgtattaaacactgcattcggctggccgactattgctgtcgacacgcacattttccgcgtttgtaatcgtactcaatttgcgccggggaaaaacgtcgaacaggtagaagaaaagctactgaaagtggttccagcagagtttaaagtcgactgccaccattggttgatcctgcacgggcgttatacctgcattgcccgcaagccccgctgtggctcttgtattattgaagatctttgtgaatacaaagagaaagttgacatctgaagaaaaggggtaacaccgattaccccattgataacctttctttatcctcttttaaaacatctttttaacgtcaatgatgccattgcttagcgttatcatcaggtaatccgtttgcggataaccaaaaatgcaggttaattgtttttttaatagcgaaattttctattcattcgtgatcaagatcacgatgctgtcgcaatgtaaaaacattgcaagaatcaggttaaaatcatttaaatttacacacgcaacaaatattgacctacaaaacattacactggctatttttcagaaactggactatctcactagtaaaaacgctaaatagcagaacatatcgccgttaagccatcacccccctctcagtgcagtgaaaaaatctgccgttacgttttttgaaaaatttaacgctggataacatttcccggaatggttgaattccccgcctcagttatatgtaacagattattacaaaggacttgtctgaaagtgcaagatagtgaacattacctgccgtttcccctcccactataacaattgcgcgtatgttttttatacataacgcgagaaagcacccccgttaatatgggatgtaaaaaaagaggtaaaagtgtccactgcaaaccaaaaaccaactgaaagcgtcagtttgaacgctttcaaacaaccgaaggcgttctatctcatcttcagcattgagttatgggaacgttttggttattacggcctacaaggaattatggctgtttacctggttaaacaactgggtatgtctgaagcggatagtatcacccttttctcttcctttagtgccctggtttatggtctggtcgctatcggcggctggttaggtgacaaggtactgggtactaaacgcgtaattatgctcggcgctattgtgctggcgattggttatgctctggttgcctggtctggtcacgacgccggtatcgtttatatgggtatggcggctattgcggtcggtaacggcctgtttaaagctaacccgtcttctctgctttctacatgctatgagaaaaacgacccgcgtctggacggtgcattcaccatgtactacatgtccgtcaacatcggctctttcttctctatgattgctacgccgtggctggccgcgaaatacggctggagtgttgcgtttgcgttgagcgttgtaggcctgctgatcactatcgttaacttcgccttctgccaacgctgggttaaacagtacggtagtaaaccagacttcgagcctatcaactaccgtaacctgctgctgaccattattggtgttgtggcactgatcgctatcgccacctggctgctgcacaatcaggaagttgcgcgtatggcgctgggcgttgttgccttcggtatcgtggttatcttcggtaaagaagccttcgcgatgaaaggtgctgcgcgtcgtaaaatgatcgttgccttcatcctgatgctcgaagccattatcttcttcgtgctgtacagccagatgccaacgagtctgaacttctttgcgattcgtaacgttgagcactccattctgggtctggccgtagaacctgagcagtatcaggcactgaacccgttctggatcatcatcggtagtccgattctggccgctatctataacaagatgggcgataccctgccgatgccaaccaagtttgcaatcggcatggtgatgtgttctggtgcgttcctgattctgccgctgggtgcgaaattcgcgtctgacgctggtatcgtgtctgtaagctggctggtcgcaagctatggcctgcagagcatcggggaactgatgatctctggtctgggtctggcaatggttgctcaactcgttccgcagcgtctgatgggcttcattatgggtagctggttcctgaccactgccggtgcaaacctgattggtggttatgttgcgggtatgatggctgtgccggataacgttaccgatccgctgatgagtctggaagtctatggtcgcgtattcttgcagattggtgtcgctactgccgttattgcagtactgatgctgctgaccgcgccgaaactgcaccgcatgacgcaggatgacgctgcagacaaagcggcgaaagcagccgtagcgtaaaattcagggaaactcttttacaagccgctaacttttcgttagcggctttttttttgttcagcaacgcactaccatactttaaaccacagacaaaaggagttaccgatgaaattgttctacaaaccgggtgcctgctctctcgcttcccatatcaccctgcgtgagagcggaaaggattttaccctcgtcagtgtggatttaatgaaaaaacgtctcgaaaacggtgacgattactttgccgttaaccctaaggggcaggtgcctgcattgctgctggatgacggtactttgctgacggaaggcgtagcgattatgcagtatcttgccgacagcgtccccgaccgccagttgctggcaccggtaaacagtatttcccgctataaaaccatcgaatggctgaattacatcgccaccgagctgcataaaggtttcacacctctgtttcgccctgatacaccggaagagtacaaaccgacagttcgcgcgcagctggagaagaagctgcaatatgtgaacgaggcactgaaggatgagcactggatctgcgggcaaagatttacaattgctgatgcctatctgtttacggttctgcgctgggcatacgcggtgaaactgaatctggaagggttagagcacattgcagcatttatgcaacgtatggctgaacgtccggaagtacaagacgcgctgagtgcggaaggcttaaagtaatagccatcggcccacaggtcgttgtgggccgaaatgagatatttcagagctttgttgcgctgaagtaatgttctggtttggcaatacgatcctgagcagccaccacttgcagctcatattcctgcattgctttggtggtcaccatgatttcgtagactgcagcggtcacatgttccagcgcctcctgcagcgttgccccctgaagcagtttcaccagcagtaaaccgctcgtcacatcaccaacacctaccggctggcgcataccaaaatccaccagcggacggctgatatgccaggcttcatcggcggtgaccagcagcatttcaaaacggtcacggctgtagccagctcgcgccaggtgtttaaccaacacaatttgtggcccttgcgcaatgagttcgcgcgctgccagaaccgcttcttcgacgttatttaccgcatgctcacagagtatttccagctcaaccagatttggcgcaatgatatcgctggcaggcaaaccgtgccgcacatgaaactctgcgacacccggtgcaacgatacagcctttttccggatgacccattaccggatcgcaaaaatatttcgcctgcggattcgcggctttcacctgacggacgataccgaggatatgttcaccctgctccgcgcttcccagatagccacttaatacggcatcacaggtgtgtaatttatcaatggcggcaatgccttgcacaatttcggttaaatggctgggcggcatcacgcagccagtccatttgccgtattgggtgtgattagaaaattgaacggtgttcagcggccagacgttcgcgcccaggcggcgcatcggaaactctgccgcactgttacccgcatgaccataaacaacgtgagactggatagcgagaatatttttcatcatgttccctgtataaaaaccagggggagtgatttctcactccccctttccacttaatgcattatttccagcaaatcagacagtaattctttttaccgcgacgcagtaaggtaaaacgaccaaacagacgatcttcttctttaaagaagtattcaggatcggactgtttttcaccgttaatggtgatggcattggaggcgatagttttacgtgcctgaccacgggaaggttgcagttcagaatcgaccagtgcctgcatcaggtctgcgcccttttccatctcaaccatcggtacgccgtcctgcgccagctgttcgaagtccgcttcactcagcgcactcaaagaaccgctgaacaggcattcggtaatacgttttgccgcctgtaaaccttcttcaccgtgaaccagacgagtcacctgctccgccagtacatactgggcgcgcggtgctttaccgctgtttttatcttcttcttccagggcgttgatctcttcaatgctcataaaggtgaagaacttcaggaagcggtaaacgtcggcatccgcagtgttgatccagaactggtagaatttgtacgggctggttttcttcggatccaaccagactgcgccgccttcagttttaccaaatttggtgccatctgctttagtgatcagcggaacggtcaggccaaacacctgattctgatgcagacgacgggtcaggtcgataccagaagtgatgttaccccactggtcagaaccaccaatttgcagcaccacaccgtactgtttgttcagacaggcgaagtcataaccctgcaacaggttgtaggaaaactcagtgaagctaatcccctgatcttcacggttgagacgctgcttaaccgcttctttgttgatcatctggttaacggagaagtgtttgccaatatcgcgcaggaaggtcagcacattcatattgccgaaccagtcatagttgttcgccgcgatagcagagttttctccacagtcgaaatcgaggaacggggcaacctgcttacggattttgtccacccactcctgaacagtttcttcggtgttcagcttacgctcggcagctttgaagctcgggtcgccaatcagacccgtcgcgccgcctaccagcgcaaccggcttgtggcccgcctgctggaagcgtttcaggcataacaatggaacaagatgccccaaatgcaagctgtcagcggtaggatcgaagccgcaatagagcgcgatcgggccttgcgccagtcgctctgctaacgcttcctcgtccgtcacctgggctaccagcccccgctcttgcaattgtttaatcaagttactgcttgccatcaaaatctccatgtatataacgactgcacctttgccggtacacgacttttcgccagatgcgaaagagacatagaataaagtgccagaatcaggagtaccagcgattaaagcaagatttttgcatcttttcagggtgcaagacgatcaatcttccacgcatcattttcacgctggtacaaaaagcggtcatgcaggcgatgctcaccaccctgccagaactcaatctgttcaaggctgacgcgaaaaccgccccaaaagctcggcaatggcacttcgccctgttgaaacttctgcttcagctccaggaatttactttcaaggataccgcgggcagaaatgcgactggactgcttgctaacccatgcaccaatctggctatcacgcgggcggctatgaaaatatttcatcacttcgagagtgctaagtcgttctgctttaccgatcaccatcacctggcgctcaagggtatgccacgggaacagcaggctaacgcgcggattattttcgatttgatgtgctttacggctgccgaggttggtgtaaaacaccatgcctttttcgtcgtaatgtttgagtaaaacgatgcgctgataaggctgaccatgttcatccacggtagcgaccaccatcgcggtagggtccgccagtttggcttcacaagcctgagagagccaacgttcaaaaagggttaatggatcggcgggaagatcgcggcggcgtaacccgcctttggtgtattcacggcgcagatgcgcgatttgctgcaattcgtcgttatcagacatggttttctttacggattgtcagtgggtgacgctattgtgcgccgcccctggaaaaatctcaacgctgtggattttgtaactgacagttattcaagacgatgcggtcgcgtttatagacagtcgcttcatcgcctttgctccagaaaacatagattccgtcagtgtaacgcgcgccagaggcactaatgccctgtttgagatgcagtagttgattatcgtaaacaaaactgacctcctggcgcggattattcagtttgaccgtcaacggtttttcatcacactggtattccagcgtatcggtttgcatgcgctcaaccagctgattaaaggcgctacagccggagagaaggaccggcaaaatgataattaacagttttttcatagtcatatcccgaagactttcctggtctggagggcaatacgccctccctaacgttccaagtgtaacggcagacgcggtaagaaaaattcagttaactctgatatcacgggttagcggggaaaatagcccccagtaccgtctcctggcttgcgccagtgacggaaggcagatttcctggtaatcccgccagcgtccgccaggcaagccaggcgaaagccaatgcttccatgtcatcgccactaatgccaacggcatcggtggtggtgacttctgtgcctggcagtaatgccgccagacgcgccatgagtagcggattacgactacctccaccacataccatcaatcgttcgcagccaccgctcaacaaaacttgttcagaaatggtcacggcggtgagttctgccagtgtcgcctgcacatctcggggatcaacacccggaaaatggcgcaaatggcgctccagccaaccatagttaaagtattcgcgtccggtgcttttcggtgcaggttggctgaaatacgggtcgctgagcatattttgcagcagtgggagaataactttacccgcccgtgcccactcggcatctttatcgtaaggtttaccggcctgacgccagatccaggcatccatcagcatgttaccaggaccggtatcgtagcccccaaccggctgcccaggaatgagcagactcagattggcgatgccgccaatattgagcaccattcgtcgctcggttgggtgagccagcagcgcatgatggaacgcaggtaccagcggtgcgccttgtcctcccaaggcaatatcgcgacggcgaaaatcaccgacaaccgtaattccggtgcgtgccacaatttgattgttatcgccaatctgtaaagtgtgtggtgccacgcccgtcggttcatgccagacggtttgaccgtgacaaccgatcgcaactatatctcttgcctgcagattttgttccttaagcaaggcattgaccgcatcagcaaaaagttgcccgagttgagtatcaagctgtccaaactggctaagtgtaagctgctggccctggcaaatatccagtacagcctgtttcagagataccgggatcggccaactcaaacttgccagctgtgcgacccggtgttcatcaattgtcgccaacacaacatcaacaccatcaaggctggtgccactcataacgccaataaagcggccgcttttcatagttcatcctttttcaatctgacgtttgcgcaccactcaaacataaacttttcgtgaataccatgcggaatgaccgatttttaccgttggtagtaaaacattatcttcaaatcaataatcatcatgaatgttttgtttataattggttgatcctactttcattatgatttgctcatatttggtagaacatgtaaccatggattcacatatgccatatactttgaccatgagggatgcttgcgtggcgtttcatggtgaacaggagatttttcaatgattaaacgcgtattggttgttagtatggtaggtctgtctcttgtcggttgtgttaataacgacaccctgagtggggatgtttataccgcttctgaagcgaaacaagtacagaatgtcagctatggcaccatcgttaacgtacgtccggtacagattcagggcggtgatgattccaacgttatcggtgcaattggcggtgctgttcttggtggtttcctggggaatactgttggtggcggaaccgggcgttctctggctactgcagcaggcgctgttgcaggtggcgtagctggtcagggcgtacagagtgcaatgaacaaaacgcagggtgtcgagctggaaattcgtaaagacgatggtaataccatcatggtggtacagaaacaaggcaacactcgtttctctccgggccaacgtgtcgtactggccagcaatggcagtcaggtgaccgtttctccgcgctaaataagtttgcgtgtggtcaggttactgaccacacgcccccttcatttcaccctttggcctgtaactcaatgatattatgctcaagttttgcgatgagcgtaatcagttgctccagttcctctgcggagatgccatgtaatatttccgcgcgggttttgttaataacagcttccatttcgctgatcagcggctctgccttttccgtcagtttaatacgtttagcccgacgatcgctggcacaagtttgacggctaattaaccctttttcttccagttggtccagagtacggaccagacttggctgctcgatgccaatcgcttttgccagttgaatttggctctggtctggaggtaactgatggatattgtgtaacgtaacccaatgggtttgtgttaactccagcggtttcaggcgatggtctatcagagcacgccatatgcgcaccaaccgtgccagatcagaacctagtgggctttccaatttcatctccttataattagcttgctaagatattatgcggcttttagaatagtgtgcagcaattgtattgctaaaacaaatgtattgctgcatttggttaccgtcagacatatttttcagaaattgcgcgtaaatttttcgcacttaaagaatatttattaatctaacgcaatatattcggtcgtaaaggaatctactttgtgaagtttatgctcaatgcaacaggattgcccttacaagatctggtgttcggtgcgtccgtctactttcctccgtttttcaaagcattcgcgtttggattcgtcatctggcttgtcgtacaccgcctgcttcgtggctggatctacgccggtgacatctggcatcccttgttaatggatttaagcctgtttgcgatttgcgtttgccttgctctggcaatactgattgcgtggtaactatgagtattaaaacaattaagtatttcagtacaatcattgtagcggtagttgcggttcttgccggatggtggctgtggaattattacatgcaatctccgtggacacgcgacgggaaaatacgcgcagaacaggtttctatcaccccacaggtgagcggacgtattgttgagctgaatataaaagacaaccagctggttaacgcgggggatcttctgctcacgatcgataaaacgccctttcagatcgccgagctgaacgcacaggctcagctggcgaaagcgcaatctgacctcgcaaaagccaataacgaagcgaatcgtcgtcgtcatctcagtcaaaattttatttctgccgaagaactcgataccgctaacctcaatgttaaagcgatgcaggccagtgttgatgccgcacaggcgacgctgaaacaggcacaatggcaactggcgcaaacggaaattcgcgccccggtgagtggatgggtgactaaccttactacccgcatcggcgattacgctgataccgggaaaccgctgtttgcccttgtcgacagccacagcttttacgtcattggttattttgaagaaaccaagttgcgccatatccgcgaaggtgcaccagcacaaattaccctctatagtgataacaaaacgttacagggtcacgtttccagtatcggtcgggcgatttatgatcagagcgttgaaagtgacagtagccttattccggatgttaaacctaacgtcccctgggttcgactcgcccaacgcgttcccgtccgctttgcgctggataaagtcccaggcgatgtcacgttggtgagcggcaccacctgtagcattgccgtaggtcaataatgaacgcaagcagttggtccttgcgcaatttgccctggttcagggccacgctggcgcaatggcgttatgcgttacgcaataccattgccatgtgtctggcgctgacggttgcctattatttaaatctggatgaaccctattgggcgatgaccagcgctgcagtggttagctttcccaccgttggcggtgttatcagcaaaagcctcggacgcatcgctggcagtttgctcggagccattgcggcactgcttcttgccgggcatacgctcaatgagccgtggttttttctattgagcatgagcgcgtggcttggcttttgtacctgggcctgtgcgcacttcacgaataacgtcgcgtatgcatttcaactggcgggctacacggctgccatcatcgcctttccgatggttaatattactgaggccagccagctgtgggatatcgctcaggcgcgcgtttgcgaggtaatagtcggtattttgtgcggcggcatgatgatgatgatcctgccgagcagttccgatgctactgcccttttaaccgcattgaaaaacatgcacgcccgattactggaacatgccagtttactctggcagcctgaaacaaccgatgccattcgtgcagcacatgaaggggtgattgggcagatactgaccatgaatttgctgcgtatccaggctttctggagccactatcgttttcgccagcaaaacgcgcgccttaatgcgctgctccaccagcaattacgtatgaccagtgtcatctccagcctgcgacgtatgttgctcaactggcccagtccgccaggtgccacacgagaaattctcgaacagttgctgacggcgctcgccagtagccaaacagatgtttacaccgtcgcacgtattatcgccccgctacgcccgaccaacgtcgccgactatcggcacgtcgccttctggcagcgactacgttatttttgccgcctttatctgcaaagtagtcaggaattacatcgtctgcaaagcggtgtagatgatcataccagactcccacggacatccggcctggctcgtcataccgataacgccgaagctatgtggagcgggctgcgtacattttgtacgttgatgatgattggcgcatggagtattgctagccaatgggatgccggtgccaatgcattaacgctggcagcaattagctgcgtactctactccgccgtcgcagcaccgtttaagagcttgagtcttctgatgcgcacgctggtgttacttagcctattcagctttgtggtcaaatttggtctgatggtccagattagcgatctgtggcaatttttactgtttctctttccactgctggcgacaatgcagcttcttaaattgcagatgccaaaatttgccgcattgtgggggcaactgattgtttttatgggttcttttatcgctgtcactaatcccccggtgtatgattttgctgattttcttaacgataatctggcaaaaatcgttggcgtcgcgttggcgtggttagcgttcgccattctgcgtccaggaagcgatgctcgtaaaagccgccgccatattcgcgcgctgcgccgggattttgtcgatcagctaagccgccatccaacactgagtgaaagcgaatttgaaagcctcacttatcatcacgtcagtcagttgagtaacagccaggatgcgctggctcgccgttggttattacgctggggtgtagtgctgctgaactgttctcatgttgtctggcaattgcgcgactgggaaagccgttccgatccgttaagccgagtacgggataactgtattagtctgttgcggggagtgatgagtgagcgtggcgttcagcaaaaaagtctggcggccacacttgaagaattacagcggatttgcgacagccttgcccgtcatcatcaacctgccgcccgtgagctggcggcaattgtctggcggctgtactgcagccttagccaacttgagcaagcaccaccgcaaggtacgctggcctcttaattacttaattacaccacaggcatagcgttcaccgccaccgcccagcggtttaggttgatcggacatattatcgccgccaacgtggaccatcagcgctttgtctttgatttcatccagacttttcagacgaggcgcgatgacggcatcggtagctttgccgtcattattgacgaccagtgcaggcagatcgcctaaatgcccggcaccttctggcccttcatgtttaccggtattttgtggatcaagatgcccgcctgcggattccgcggcgctggctttgccatctttggtggctggctggcagcttcctttggcatgaatatggaagccatgttcaccggggggtaatgctttcagatcggggctaaactccagacctttatcggtttcagtaatggtgacgctaccaatactctgccctaccccttggctcgtgacgaggttcatctcgactttttcactggcagcttgtgcgccggttgcaacaaccagcgccagaatagccagactaaaacgtttcataggacctccgttcattgtgcattcctgaataagtgtaaaccagtgacacatttttgaacggcggctattcctaaaagtgcttacggtacgtcgtaccccagtgccgctttacggatacgaaaccattgttgacgggtcattttcagtgtttctgcttcgacagctgcccgtacgcgctcaattttaccactaccgataattggcagcggctggcttggtaaacgtaatacccaggcgtaaaccacctgttcaatgctgcccgcgtttaactcctctgccaccacagccagttcatcacgcagcggctggaaataatcatcattaaacagacgaccaccaccaaggcaggaccacgccatcggacgaacacgcagttgttgtagttggtcgagcgtgccatccagcagtaacggctgatgcaccggggatatttccacctgattagtggcaagggtaaacggcagacgactttgcaacagggcaaattgcgcaggcgtaaagttgcttacgccaaaatgacgcactttgccgctctgatgcagatgtttgaacgcgtccgccacttcatcggcatccattaacgggtctggtcggtggattaacagcaaatccagatgatcggtcgcgagattaattaggctctgttcggcgctcttaatgatgtgatcgcggtcagtgatgtaatgaccaatgacgttttcttcacgcgcggtcgtcgcgataccgcatttactgacgatttccatccgttcacgcaggtgaggtgccagtttcagtgcctcgccaaacgccgcttcgcactgatagccaccataaatatcagcatggtccacggtggtcacgccgagatccagatgctcttcaataaaactgaccagctggcgggcggacatattccagtccatcaatcgccagtagcccatcacaaaacgggaaaactccgggccttgcggcgcaatagtaatacgctgaaccataatcgcttcctcttatcagatatgagaggagtatacgcaagattaggttcaaaagagacttggttgctccggttcgtcactactcgctggcttatttgcgcgtaatttgcgcattaatcgctgccgacaaaggcgcagcacctcttgtttttcgccatcgctcattttattccagttaaaacgctcatcacgactacgaaaacagccgcgacaaaacccgcgttcgtcagactggcaaattccccggcacgggctctggacgggaaagaactctaattgctccgccacttcgccctcctcagataagattattaccattattgaagctgttaatgtccaaagtagcaactttgcttgcactagaccgactggtctactacactccaacgcatgaacaaacacaccgaacatgatactcgcgaacatctcctggcgacgggcgagcaactttgcctgcaacgtggattcaccgggatggggctaagcgaattactaaaaaccgctgaagtgccgaaagggtccttctatcactactttcgctctaaagaagcgtttggcgttgccatgcttgagcgtcattacgccgcatatcaccagcgactgactgagttgctgcaatccggcgaaggtaactaccgcgaccgcatactggcttattaccagcaaacactgaaccagttttgccaacatggaaccatcagtggttgcctgacagtaaaactctctgccgaagtgtgcgatctgagtgaagatatgcgcagcgcgatggataaaggtgctcgcggcgtgatcgccctgctctctcaggcgctggaaaatggccgtgagaaccattgtttaaccttttgtggcgaaccgctgcaacaggcacaagtgctttacgcactgtggcttggcgcgaatctgcaggccaaaattagccgcagtttcgagccactggaaaacgcgctggcccatgtaaaaaacattattgcgacgcctgccgtttaacaggcattttttatcaccagacgaccgggagcctttatgagttctgaaaaactgtattccccactgaaagtgggcgcgatcacggcggcaaaccgtatttttatggcaccgctgacgcgtctgcgcagtattgaaccgggtgacattcctaccccgttgatggcggaatactatcgccaacgtgccagtgccggtttgattattagtgaagccacgcaaatttctgcccaggcaaaaggatatgcaggtgcgcctggcatccatagtccggagcaaattgccgcatggaaaaaaatcaccgctggcgttcatgctgaaaatggtcatatggccgtgcagctgtggcacaccggacgcatttctcacgccagcctgcaacctggcggtcaggcaccggtagcgcctagtgcacttagcgcgggaacacgtacttctctgcgcgatgaaaatggtcaggcgatccgtgttgaaacatccatgccgcgtgcgcttgaactggaagagattccaggtatcgtcaatgatttccgtcaggccattgctaacgcgcgtgaagccggttttgatctggtagagctccactctgctcacggttatttgctgcatcagttcctttctccttctagtaaccatcgtaccgatcagtacggcggcagcgtggaaaatcgcgcacgtttggtactggaagtggtcgatgccgggattgaagaatggggtgccgatcgcattggcattcgcgttagtccaatcggtactttccagaacacagataacggcccgaatgaagaagccgatgcactgtatctgattgaacaactgggtaaacgcggcattgcttatctgcatatgagtgaaccagattgggcggggggtgaaccgtatactgatgcgttccgcgaaaaagtacgcgcccgtttccacggtccgattatcggcgcaggtgcatacacagtagaaaaagctgaaacgctgatcggcaaagggttaattgatgcggtggcatttggtcgtgactggattgcgaacccggatctggtcgcccgcttgcagcgcaaagctgagcttaacccacagcgtgccgaaagtttctacggtggcggcgcggaaggctataccgattacccgacgttgtaatccaacattgcgagcggcgtaaagccgccgctatactaaaacaacattttgaatctgttagccattttgaggataaaaagatgcgtcttcttcataccatgctgcgcgttggcgatttgcaacgctccatcgatttttataccaaagtgctgggcatgaaactgctgcgtaccagcgaaaacccggaatacaaatacagtctggcgtttgttggctacggcccggaaaccgaagaagcggtgattgaactgacctacaactggggcgtggataaatacgaactcggcactgcttatggtcacatcgcgcttagcgtagataacgccgctgaagcgtgcgaaaaaatccgtcaaaacgggggtaacgtgacccgtgaagcgggtccggtaaaaggcggtactacggttatcgcgtttgtggaagatccggacggttacaaaattgagttaatcgaagagaaagacgccggtcgcggtctgggcaactaatctcctgccgggcgtgaactcatcgcgcccgcatctttactgcatcgacaagtaatatttgtcataatgcgcgctgcaatttatccgtattaagagaatcagatgtccgataacgctcaacttaccggtctgtgcgaccgttttcgtggtttttatcctgttgtgatcgatgttgaaacagccggatttaacgccaaaaccgatgcgctgcttgagattgccgccatcaccctgaaaatggatgaacaaggctggctgatgccggacaccacattacatttccacgtcgaaccatttgtcggcgcaaatttgcaaccagaagccctcgccttcaacggcattgacccgaacgatcccgatcgcggcgcggtcagcgaatacgaggcgctgcacgaaatttttaaagttgtacgtaaaggtattaaagcgagcggctgtaaccgcgccattatggtggcgcacaatgccaattttgatcacagctttatgatggccgccgcagaacgcgccagtctgaaacgtaacccgttccaccctttcgccacttttgacactgctgcactggccgggctggcactcggacaaaccgtattgagtaaggcttgccagaccgctggcatggacttcgacagcacccaggcgcactccgcgctgtacgacaccgaacgcactgctgtgctgttttgtgaaatcgtcaaccgctggaaacgtctgggaggctggccgctatctgccgccgaagaggtgtaatcgagtcgatgcctgatgacatgcaatgattcaggcatctatagtgaggctattccacgcatcctgcatgatattcacggggaatagcgttaatggcagataatccagaccctagtagcctcctgccggacgtgtttagtccggcgacccgcgactggtttcttcgcgcctttaaacagccgaccgctgtccagccgcaaacctggcatgtggcggcgcgaagcgaacatgcgctggtgattgcaccgaccggctccgggaaaacgctggcagcatttctctacgccctcgatcggctcttccgcgaaggcggcgaagatacccgcgaggcgcataagcgtaaaaccagtcgcatcctctatattagtccgataaaagccctgggcaccgacgttcagcgcaacttgcagatcccgttgaagggtattgccgatgaacggcggcggcgcggcgaaacggaagtcaatcttcgcgtagggatccgtactggcgatacgcctgcacaggaacgcagcaaactcacccgtaatccgccggatattctgatcaccacacccgaaagtctctatctgatgctgacctcccgcgcgcgcgaaacgctacgcggcgtcgaaacggtaattattgatgaagtccacgcggtagcgggcagtaaacgtggtgcgcatctggcgttaagtctggagcggctcgatgcgctgctccacaccagtgcacagcgaattggcctttctgccactgtgcgcagtgccagcgatgtggcagcatttcttggtggcgatcgcccggttacggtagtcaacccgcccgcaatgcgccatccgcagatacgaattgtcgtaccggtcgccaatatggatgatgtcagtagcgtcgccagcggcaccggcgaagacagccatgccggccgggaaggctccatctggccatatattgaaacgggtatccttgatgaagtgttgcgccatcgcagcaccattgtctttactaatagccgggggctggcggaaaaactgacggcacgattaaatgagctttacgccgcacgcttacagcgttccccgtctatcgccgttgatgcggcccatttcgagagcacctccggcgcaacctctaaccgtgtacaaagtagcgacgtttttattgcccgcagtcaccacggctccgtctctaaagaacaacgagcaatcaccgaacaggcgctgaaaagcggtgaattacgctgcgtggtcgcaacctccagtcttgaactggggattgatatgggcgcggtggatctggtgattcaggtggcaacgccgctttctgttgccagtgggttacaacgcattggtcgcgccggacatcaggttggcggtgtatctaaagggctgtttttcccccgtacccggcgtgatttagtcgattccgcagtcattgtagagtgtatgttcgcaggcaggctggaaaacctgacaccaccgcataatcctctcgacgtccttgcgcagcaaaccgttgccgccgcggcgatggatgcattacaggtagacgaatggtactcccgcgtacgccgtgccgcaccgtggaaagatctgccaagacgtgtttttgacgccacgctggatatgctttccgggcgctatccctctggcgatttttctgcttttcgccccaaactggtctggaacagggagaccgggatattgaccgcccgacctggcgctcaattgttggcggttaccagcggcggcaccattccggatcgtggcatgtatagcgtgttattacccgaaggtgaagaaaaggccggtagccggcgggtgggtgaactggatgaggagatggtatatgagagccgggtgaacgacattatcactctcggcgctaccagttggcggatccagcaaatcacccgcgatcaggtgattgtgactcctgctccgggtcgttctgcccggctccccttctggcgtggtgaaggtaacggacgtccggctgaattaggcgagatgatcggcgattttcttcatttgctggcggatggcgcgttcttttccgggactattcccccgtggctggcagaagaaaatacgatcgccaatattcaggggttgattgaggagcagcgcaacgcgacgggcatcgttccggggagtcgccatctggtcctcgaacggtgccgtgatgaaattggtgactggcgtattattttgcactctccctatggaagacgggtgcatgaaccctgggcggtggcgattgccgggcgaatacatgcgctatggggcgctgacgcgagcgtggtcgccagtgatgacggcattgttgcacgtattcctgacaccgatggtaaattgcccgatgccgcgatttttttgtttgaaccagaaaagttgctgcaaattgtccgcgaggcggtaggcagcagcgcacttttcgccgcccgttttcgcgaatgcgccgcgcgggcattattaatgccggggcgcactccgggccatcgcaccccgctttggcaacaacggctgcgcgccagtcagttgctggaaatcgctcagggatatccggattttccggtcattctcgaaaccctacgcgaatgtctgcaagatgtttatgatcttcccgcactggaacgtttgatgcgtcgcctgaacggtggcgaaattcaaatatccgatgtaacgaccactacgcccagccctttcgccacaagtttattgttcggctatgtcgcggaatttatgtaccagagcgacgccccgctggcagagcgccgggcatccgtactgagcctggacagcgagttactgcgcaatctactcggacaggtcgatccgggggaattactcgacccgcaggtcattcgccaggtggaagaagagttgcaacgactggctcctggcagaagagcgaaaggtgaagaaggattgttcgacctgctgcgcgaactggggccaatgaccgttgaagacctggcgcaacggcatacaggcagcagtgaagaggttgcgagctatctggaaaatcttcttgcagtaaaacgaatcttcccagcgatgattagcggacaggagcgtcttgcctgtatggatgatgccgccaggctgcgtgatgccctcggcgtacgactaccagagagtttgccagagatttatttacatagagtcagttacccgcttcgcgacctctttctgcgctatctccgggctcatgctctggtcacggctgaacaactggctcatgagtttagtctcggtattgccattgtcgaagagcagcttcagcaactgcgtgaacagggtctggtgatgaatctgcaacaagacatctgggtgagcgatgaagtatttcgtcgtctgcgtttgcgcagcctgcaagccgccagagaagcgacgcgtcccgttgcagccacgacctatgcgcgattgctgctggaacgtcagggcgtattacccgccaccgatggtagcccggcgctctttgccagtacaagcccaggcgtttatgagggcgtagatggcgtgatgcgggtgatcgaacagcttgccggagtcggtttacccgccagtctctgggaaagccagatcctgcctgcccgcgtacgcgactatagcagtgaaatgctcgatgaattactggcaaccggtgcggttatctggagcgggcaaaaaaaactgggtgaagatgacggcctggtggcactgcatctacaggaatatgctgcagaaagcttcactcccgccgaagcggatcaggcgaatcgtagcgcgctgcaacaagcgatagtcgctgttctggctgacggaggagcctggtttgcacaacaaatcagccaacggatacgcgacaaaatcggcgaaagcgttgatctctctgccctgcaagaggcgttatgggcgctggtctggcaaggcgtcatcaccagcgacatttgggcaccgttacgcgccctcacccgcagcagttccaacgcacgcaccagtactcgccgcagtcaccgggctcgtcgtggacgtcctgtctatgcgcaacccgtcagcccgcgggtatcttacaacacaccaaatctggctggacgctggagcttattgcaggtggagccactaaacgataccgaaaggatgctggcgctggcggaaaatatgctcgaccgctacggcatcatcagtcgtcaggcggtgatagccgaaaatatccctggcgggtttccaagcatgcaaacgctttgtcgaagtatggaagactccgggcgaattatgcgaggtcgttttgtagaaggtctgggtggcgcgcaattcgctgaacgtctgactattgaccgattgcgcgatctggcgacacaagccacgcaaacgcgccactatacaccagtggcgctctctgccaacgatccggctaatgtgtggggaaatcttctgccctggcctgcacatccggcaacgctggttccaacgcgtcgggcgggtgcgctggtggtcgtttctggcggcaaattgttactctatctggcgcaaggtggcaaaaaaatgctggtctggcaggaaaaagaggaattactcgccccagaggttttccacgcgctgactaccgcactgcgtcgcgaaccacggctgcgctttacgctaacagaagtgaatgatctaccggtccggcaaacgccgatgtttacgctgctgcgtgaggcgggatttagtagtagcccacaagggctggattggggataaagaaaggactgacggatgcccgttcgcatccgtcagtattgcaggacggattattccgcgtccggctcttcagacttgtatttagcggcagtttctttgatcagctgctgcagttcgccacgctgatacatttcgatcacgatatcacaaccgccgaccagctcgccgtcaacccacagttgcgggaaggtcggccagttagcatatttcggcagttccgcacgaatgtccggattctgcagaatatcaacataggcaaaacgttcgccacatgcggcaagcgcctggactgcctgggcagagaaaccgcagctcggcagtttcggactacctttcatgtacagcaggatcgggttttcagcaatctggcgttggattttttcgatagtggtgctcattgtcttgcttcctcaaacttctttacggcagtaatctgacattgtagcgggtcagtgcggcatcggaaaataacattttcatcacgcttttgctattttatccctttgctctatttgttgcatttcaaatattcgtttcttctctgatgccggcaaactggcgtatttataaccatttttagctttcactgctgcatttttttgcgctcgccaacgaaacgtattttttaacaataaaagctattaactttctcttcttctatgcattagaatcatcaagttttgtaaatcagacgcaggcatgatagacctgcctttacagagggacgctcagtggcgcggataaaccgtattagcatcacgctctgtgctttactttttaccaccctgcctttaacgcctatggcccatgctagtaagcaagccagggagagttctgctaccactcatatcaccaaaaaagcagataaaaagaaaagcacggcaaccaccaaaaagacccagaaaacagcgaaaaaagccgccagtaaaagtacgaccaaaagcaaaaccgcttcttccgttaaaaaatcttccattaccgcttctaaaaacgccaaaactcgcagcaaacacgccgtcaataaaacggccagtgccagctttaccgaaaagtgtaccaaacgtaagggctataaaagccattgtgtgaaagtcaaaaatgccgcgagtggaactcttgccgacgcgcacaaagcgaaggtgcaaaaagctacgaaagtggcaatgaataaactgatgcagcaaattggtaagccatatcgttggggtggcagcagtccgcgtaccggttttgattgcagcggcctggtttattacgcttataaagatttggtgaaaattcgtattccgcgtacggcgaatgaaatgtatcacctgcgtgatgcagcgccaatcgaacgtagtgaactgaaaaacggcgacctggtctttttccgtactcagggacgcggcacagccgatcatgtcggcgtgtatgtcggcaacggcaaatttattcagagtccgcgcacaggtcaggaaattcaaatcacttctctcagtgaagactactggcagcgccactatgttggcgctcgtcgggtaatgaccccaaaaacacttcgctaaaactttaccctgttgttacggcaacagggtaagttcatcttttgtctcaccttttaatttgctaccctatccatacgcacaataaggctattgtacgtatgcaaattaataataaaggagagtagcaatgagtttcgaattacctgcactaccatatgctaaagatgctctggcaccgcacatttctgcggaaaccatcgagtatcactacggcaagcaccatcagacttatgtcactaacctgaacaacctgattaaaggtaccgcgtttgaaggtaaaagtctggaagagattattcgcagctctgaaggtggcgtattcaacaacgcagctcaggtctggaaccatactttctactggaactgcctggcaccgaacgccggtggcgaaccgactggaaaagtcgctgaagctatcgccgcatcttttggcagctttgccgatttcaaagcgcagtttactgatgcagcgatcaaaaactttggttctggctggacctggctggtgaaaaacagcgatggcaaactggctatcgttagtacctctaacgcgggtactccgctgaccaccgatgcgactccgctgctgaccgttgatgtctgggaacacgcttattacatcgactatcgcaatgcacgtcctggctatctggagcacttctgggcgctggtgaactgggaattcgtagcgaaaaatctcgctgcataataactgatggcaaatgcagcattgcctgaagcgctacgcttatcaggcctacgcggatcatcgatgtaggtcggataaggcactcgccgcatccggcaagataaatcgcacgttgtcagcaactgtaacgcagaaggttatccttctgcgtttttgtttaattagctgttagcaacgcaaactgtttcaggttgttttctggcactcataaacaccagcaataatgccagtcccgcgacaatcgctcccatcaccggcacaaagctgtatcccagcccagcggaaattaccgcaccaccagcagctgctcccagcgcatttccaagattaaaggcaccaatattgacactactagacagacctggcgcttcactggcgacacgcatcacgcgcatctgtaacggcggtacgaccgcaaaggttgctgcgccccacaccaccatgctaatagctgcgccgaactcattgcgggccaggaacgggattgccagcataatcaccatcaacaacaacaaaaagcctttcaacgtgccgttaacactacgatctgccagtttgccgccgagatagttaccgatagagaatccgacaccaatcagcaccagcattgccgtgacgaacaccggtgttgcgtgggtaatactttgcagtaccggagagatataggtgtagagagtaaacattgcaccagctcccagtaccgtcgtcagcaatgcagacagcacctgcggacgcattaataccgccagctcttttttcacttcaggtcgtgcccctgcaccacctttaggtaaactgaagaacagacttaccatactaatcactcccagccccgccgttgccagaaaactcatccgccagccgatggtttcacccaaccaggtcgccgccggcacgccaccgatatttgccagggttaaccccataaacatagtggcaactgcgctggcctgtttatgttttggcaccacgcttgcggccacgacactacccaaaccaaaaaatgctccgtgattcaggctggtcaaaatgcgactaagcatcagggtcatataatccggcgcgatggcggaaagtacgttgccgagcgtgaaaattgccatcaggaaaatcaacgcactgcggcgggcacgatgagaaagtagaagcgtcatcagcggcgcgccaaccattacgccaactgcataggcactgattaacattccggcagcgggaatgctgacatccacaccgcgcgcaatgacgggcaacaagcccattgggctgaactccgttgtcccgataccaaacgcgccaatcgccagcgccagcaacggatagttaattttcatgccttatctccacctcttcgcgtcattacgcgatattcattaaagtggcgaaagcatgacagcaatcacaaaaaaatgaaaataacaaaaagagaaaacacttttgccattttgctaacaaacaggaaggagatgcgagggagaacgcgctccctcgagaggaaatcagtgcagcgcggcagtcaaacccacggctacgatcaaaccgaggacgataatcgttgttaccagtgaaaatttaaggtcggtgctcatcaagttttctccttttttattaccacacaaaaagtgatattacgcatttttacacactgtgatgaaaaaatctcccgtcatttataatgataagtgtttttaccacttccccttttcgtcaagatcggccaaaattccacgcttacactatttgcgtactggccattgaccccttcctgacgctccgtgtcgtttttccggcgtaccgcaacacttttgttgtgcgtaaggtgtgtaaaggcaaacgtttaccttgcgattttgcaggagctgaagttagggtctggagtgaaatggaatggcaacaataaaagatgtagcgaaacgagcaaacgtttccactacaactgtgagtcacgtgatcaacaaaacacgtttcgtcgctgaagaaacgcgcaacgccgtgtgggcagcgattaaagaattacactactcccctagcgcggtggcgcgtagcctgaaggttaaccacaccaagtctatcggtttgctggcgaccagcagcgaagcggcctattttgccgagatcattgaagcagttgaaaaaaattgcttccagaaaggttacaccctgattctgggcaatgcgtggaacaatcttgagaaacagcgggcttatctgagcatgatggcgcaaaaacgcgtcgatggtctgctggtgatgtgttctgagtacccagagccgttgctggcgatgctggaagagtatcgccatatcccaatggtggtcatggactggggtgaagcaaaagctgacttcaccgatgcggtcattgataacgcgttcgaaggcggctacatggccgggcgttatctgattgaacgcggtcaccgcgaaatcggcgtcatccccggcccgctggaacgtaacaccggcgcaggccgccttgccggttttatgaaggcgatggaagaagcgatgatcaaggtgccggaaagctggattgtgcagggtgactttgaacctgaatccggttatcgcgccatgcagcaaatcctgagccagccgcatcgccctactgccgtcttctgtggtggcgatatcatggcaatgggcgcactttgtgctgctgatgaaatgggcctgcgcgtcccgcaggatgttagcctgatcggttatgataacgtgcgcaacgcgcgctattttacgccggcgctgaccacgatccatcagccaaaagatagcctgggtgaaacagcgttcaacatgctgttggatcgtatcgtcaacaaacgtgaagaaccgcagtctattgaagtgcatccgcgcttgattgaacgccgctccgtggctgacggcccgttccgcgactatcgtcgttaatcacccgttgcgggagtctcttccggctcccgcagccactccttattcagcgtctcactatcgccgagatactcaagcaaccaggttaacgcagggctcatatcattttgctgccatgtcagacaacatgcgctatccggaaaggggttttccagttctaatgctacccacttcccctcattaagccacggtttggcgaaatgtgttggcaccatccctatgcataatcctgcgctgatacaggttgcgctactttcccagtcaggcacgacaactcttttttggttatccagcaaccaggtaatacgtttaggtagcgttcggctggtgtcttcgcgcaccaagctcggccagttgcgcaacgtatcatcgctgaacgggccatccatcaacgccagcgggtggtgactggcaacaacgcaactccagcttagcatccccatatcccggaaggcataacgaccgcctaccggaatcgcgcgtgttgcgccaatcgccagttccacgcgcccgtcggaaagcgcatcccagacaccgttgaacacttcctgaaagacaagaagttcgacatcatcaaaatggcgataaaaatcaacgatcatctgccgtgtacgttctggcctgacaatattatccactgcgatagctaactgaccgcgccagccgttcgctatctgctgacattgctggcgggtgatctgcatttttttgacaacagagcgcccttctttgagaaaccacgctccagcagcggtcagctccacatcacggtgccgtcgttcaaagagcggcaccgccagccactcttccagctgacgcacggtatagctgaccgcagaaggaacgcgatgcagctcctgtgccgcagcgctaaaactaccattacgcgctaccgcatcaacaacttcgagactatattcactccacatagtctgcctgcaaaatttttgaaaccagtcatcaaatattaccgtttcacaacactaatttcactccctacactttgcggcggtgtttaattgagagatttagagaatatacatgcaacctgggaaaagatttttagtctggctggcgggtttgagcgtactcggttttctggcaaccgatatgtatctgcctgctttcgccgccatacaggccgacctgcaaacgcctgcgtctgctgtcagtgccagccttagtctgttccttgccggttttgccgcagcccagcttctgtgggggccgctctccgaccgttatggtcgtaaaccggtattattaatcggcctgacaatttttgcgttaggtagtctggggatgctgtgggtagaaaacgccgctacgctgctggtattgcgttttgtacaggctgtgggtgtctgcgccgcggcggttatctggcaagcattagtgacagattattatcctagtcagaaagttaaccgtatttttgcggccatcatgccgctggtgggtctatctccggcactggctcctctgttaggaagctggctgctggtccatttttcctggcaggcgattttcgccaccctgtttgccattaccgtggtgctgattctgcctattttctggctcaaacccacgacgaaggcccgtaacaatagtcaggatggtctgacctttaccgacctgctacgttctaaaacctatcgcggcaacgtgctgatatacgcagcctgtagtgccagtttttttgcatggctgaccggtagtccgttcatccttagtgaaatgggctacagcccggcagttattggtttaagttatgtcccgcaaactatcgcgtttctgattggtggttatggctgtcgcgccgcgctgcagaaatggcaaggcaagcagttattaccgtggttgctggtgctgtttgctgtcagcgtcattgcgacctgggctgcgggcttcattagccatgtgagcctggtcgaaatcctgatcccattctgtgtgatggcgattgccaatggcgcgatctaccctattgttgtcgcccaggcgctgcgtcccttcccacacgcaactggtcgcgccgcagcgttgcagaacactcttcaactgggtctgtgcttcctcgcaagtctggtagtttcctggctgatcagtatcagcacgccattgctcaccaccaccagcgtgatgttaagtacagtagtgctggtcgcgctgggttacatgatgcaacgttgtgaagaagttggctgccagaatcatggcaatgccgaagtcgctcatagcgaaagtcactgatctatatcgatatacttatacttaggctgctaacaaaattttgttgtatgattgaaattagcggcctatactaatttcgagttgttaaagctacgataaatattatgtttttacggggacaggatcgttcccgactcactatggatagtcatttcggcaagggttcctcctttccctctgttctacgtcggattatagactcgcggttttttctgcgagatttctcacaaagcccaaaaagcgtctacgctgttttaaggttctgatcaccgaccagtgatggagaaactatgagtagtagctgtatagaagaagtcagtgtaccggatgacaactggtaccgtatcgccaacgaattacttagccgtgccggtatagccattaacggttctgccccggcggatattcgtgtgaaaaaccccgatttttttaaacgcgttctgcaagaaggctctttggggttaggcgaaagttatatggatggctggtgggaatgtgaccgactggatatgttttttagcaaagtcttacgcgcaggtctcgagaaccaactcccccatcatttcaaagacacgctgcgtattgccggcgctcgtctcttcaatctgcagagtaaaaaacgtgcctggatagtcggcaaagagcattacgatttgggtaatgacttgttcagccgcatgcttgatcccttcatgcaatattcctgcgcttactggaaagatgccgataatctggaatctgcccagcaggcgaagctcaaaatgatttgtgaaaaattgcagttaaaaccagggatgcgcgtactggatattggctgcggctggggcggactggcacactacatggcatctaattatgacgtaagcgtggtgggcgtcaccatttctgccgaacagcaaaaaatggctcaggaacgctgtgaaggcctggatgtcaccattttgctgcaagattatcgtgacctgaacgaccagtttgatcgtattgtttctgtggggatgttcgagcacgtcggaccgaaaaattacgatacctattttgcggtggtggatcgtaatttgaaaccggaaggcatattcctgctccatactatcggtagcaaaaaaaccgatctgaatgttgatccctggattaataaatatatttttccgaacggttgcctgccctctgtacgccagattgctcagtccagcgaaccccactttgtgatggaagactggcataacttcggtgctgattacgatactacgttgatggcgtggtatgaacgattcctcgccgcatggccagaaattgcggataactatagtgaacgctttaaacgaatgtttacctattatctgaatgcctgtgcaggtgctttccgcgcccgtgatattcagctctggcaggtcgtgttcagtcgcggtgttgaaaacggccttcgagtggctcgctaaaggctattctatcgccccctctccgggggcgatttcagatcaggcttctgtgcctggttgattcatggcattttctcgtgccgccagcacacgttctaccgtatctaccactgcctgagtttgtggatcgatttcaatgttgacgcgtgcgccaagttttttcttcccaagagtcgtgcgttccagtgtttcccgaattaaatggacgcaaaaacgcgttggcgtgacttcgccgacggtcaggctaataccgtcgatgccaataaatcctttgtacagaatatatttcatcaactgactatcctggactttaaaccagatctggcgattattttcactggttaatattttcgccacttcagcagtggtcataatatgaccactcattaagtgtccgccaatttcatcactgaatttcgccgcacgctcaacgtttacccaatcccccacttttaaatcgccaagattggtaatgcgtaacgtttctttcatcaggtcaaaactgacatggttgccgttaatttccgtcacggtcaggcagcaaccgttatgcgccacggaagcaccggtttccaggccgtccagcatgtggtcgggtaactccaccacatgcgtacgaaaatttggtttctcgtcaatgctcaccagttttgcggtgccctgtacaatccccgtaaacatacttacaactcctgaaatcagttaagacattctgttcagcacaatagcaggtggaaaacgcccttaccagtgaaggggtaagaatggctattttttcactggagaattaataaatcctcgctacaatagactgaatttcccctgcttcttctttttgctgcccattcaggcggctttttagtctctcatataactacaaataaaaggtgttcacgtgcagaagtatatcagtgaagcgcgtctgttattagcattagcaatcccggtgattctcgcgcaaatcgcccaaactgcgatgggttttgtcgataccgtgatggcgggcggctatagtgccaccgacatggcggcggtcgctatcggtacttctatctggcttccggcgatcctctttggtcacggactgctgctggcattaacgccggttatcgcgcaattaaatggttccggtcgacgtgagcgcattgcgcatcaggtgcgacaaggtttctggctggcaggttttgtttccgttctcattatgctggtgctgtggaatgcaggttacattatccgctccatggaaaacatcgatccggctctggcggacaaagccgtgggttatctgcgtgcgttgttgtggggcgcgccgggatatctgttcttccaggttgcccgtaaccagtgtgaaggtctggcaaaaaccaagccgggtatggtaatgggctttatcggcctgctggtgaacatcccggtgaactatatctttatttatggtcatttcggtatgcctgagctcggtggcgttggttgtggcgtggctactgcggcggtgtattgggtcatgttccttgccatggtttcttacattaaacgcgcccgctccatgcgtgatattcgtaacgaaaaaggcaccgcaaaacccgatcctgcggttatgaaacgactgattcaactcggtttgccgattgcgctggcactgttctttgaagtgacactgtttgccgtcgtggctctgttagtgtctccgctcggtattgttgatgtcgcaggacaccagattgccctgaactttagtagtctaatgttcgtgcttccaatgagcctggcggcagcggtaactatccgcgtaggttatcgtctgggtcagggcagtacgctggatgcgcaaaccgctgcgcggaccgggcttatggtgggtgtctgtatggcaaccctgacggccattttcacggttagtctgcgggagcaaatcgccctgttgtacaacgacaatcccgaggttgtaacgctggctgcgcatttgatgttgctggcggcggtatatcagatttctgacagtatccaggtgattggcagtgggattttgcgtggttataaagatacgcgttccattttctatattacctttacggcttactgggtgctgggcttgccaagcggctatattctggcactgaccgatctggtcgttgaacctatggggccagcaggcttctggataggctttattattggcctgacgagcgcagccattatgatgatgttgcgtatgcggttcctgcaacgtctgccgagtgccatcattctgcaacgagcatcccgctaataaagacaaggcgcaaccttcacgggttgcgcctgtatttttacgcaggctggagcgttgcgccaatcccgtcttcgtctggctgtaatttcagagcgttacacagagtttgccgactggcatctgttatctcaacgtgtatatccccggtaacttcccctttcacattgatgaagtcaggactaatttcttttgcactggtttgcaggcaaatcgctccctctccgcgcaggcgtttcactttcagttgcacatgcgttgccgcatcagtgatcagccacagttttccaccattcagattgatgttaccaacaatgaaagtgacactgtcaccttttaccgtactgccgtctagaatcaacacaccgccctgctgtacagtaatcgtactttgttgcagctctgcgccataaccaataatcatactagcgccgtccagtaatgcaacactcccggtcagttcaaccggtgcgcgatcttcctctacgacaaaattttcgtccgcgctggtgggactcaacaggatcactgtcccaccttgtattaccgcgttttccagcgtaccggcatgcacttcagcccgaccacccacattcacggacaggttttgcgtcttaccggaactgtagagctgaaggccatccgtccccagacgataaatggatccattctcaacaatagtgtcagagtcttcaccaccgagattattcatggtgccaccagcaagcaacgtatcactggctttcccggccagcataaaaacgccgccctgattaatctcacaattgctggcttccccacctggatacaccaacaattcaccaccttcatctaccacgaccgcactggttgtcccattaaccaacaggccgccctcttgatcgagaatgattttttccgcgcgatgtccttccagtacacgcaggttaccgccattttccagcaacaaaccgcaggcataacctttatcaacgctgaattcaccttcgggatggcggccattaaccgtagcgagcgtagagagactaattgcgcctccctcggactgaacaatatctgtggcaatggcaccatcgctgacgcttagcgtgccattgttaccgtactgtgtgcatttggcgatcccaccggttgccactttcaaccagccagcccccgtgaccacggtattttcggctcttccgccagcttcaacaatcaactcgccttcagtaagttgcgtcgcgccaatgacctcgccggtcttaacaatttgcacgttcccgtcgctcatcaagtttttcgcatcagatcccatgatttattcctttgctgcatctgtgtgcctttattgctacctaagtgtaaaggctacggaggatttatccacgacagatttgagatggtggcaaacaactctgtttaaactctgatacacgaattattgggttgtatcagatgtaaatgcgatcctgaataaaaatcacccttgcaaatcaacaaaatatagccaatttgcttaaaagctctgcaaacggtcgaaatagcgcagaaaattacgttttgcctcttgccaccttcccactctgccgctaatattcgtccccgttgtcacctacaacgttgcgttcatagctcagttggttagagcaccaccttgacatggtgggggtcgttggttcgagtccaattgaacgcaccatcctgcgtccgtagctcagttggttagagcaccaccttgacatggtgggggtcggtggttcgagtccactcggacgcaccagattttcttaatctggtcttctcctttttccctctgtttcttctctgtatccaatacgttaaaagatttacactgtcttcgtatgcgttatcagaaggagaatcgctatggcaactttgttacaacttcattttgcttttaatggcccatttggcgacgcaatggctgagcagcttaaaccacttgctgagagcattaatcaggaacctggttttctgtggaaggtatggacagaaagtgaaaagaaccacgaagccggtgggatctaccttttcactgatgaaaaaagcgcccttgcctatctggaaaaacatactgcccgactgaaaaatctcggcgttgaggaagttgtcgccaaagttttcgatgtcaatgagccacttagtcaaatcaatcaggcaaaactcgcctgacagaatttaatcaagggcggttagcgcccttttcatccctgtctgaaatttctcaaattctaaaaatctcaaccaaacttatctgataacactaaattcgaaagaatgcgtacaggtaagtaacaatgaaaaaaattgctattgtgggtgccgggcctacggggatctacaccttattcagccttctacagcaacaaactccactttctatttctatcttcgagcaggctgacgaggccggtgtcgggatgccatacagtgatgaggaaaacagtaaaatgatgctggcaaatattgccagtattgaaataccgccgatttattgtacgtatctcgaatggctacaaaagcaagaagacagccatctccagcgttatggcgttaaaaaagaaaccttgcacgatcgtcagtttttaccgcgaattctgctgggcgaatatttccgcgatcaatttttacgactagtagaccaggcacgacagcaaaaatttgcagtggctgtttatgaaagttgccaggttaccgatctgcaaattacaaatgctggcgtcatgctcgctacaaatcaggatttacccagcgagacgtttgatttagcggtgatcgccacgggtcacgtctggcctgatgaagaagaagcaacccgaacgtattttcccagcccgtggagtggcctgatggaagcaaaggtcgatgcgtgtaacgtgggtattatgggaacatccttgagcggactggatgcggcaatggcagtggctattcagcatggtagcttcattgaagatgataaacaacacgtcgtttttcaccgcgataacgcaagtgaaaagctaaatatcacgttgttgagccgcacgggtattttacccgaagccgatttctattgccctattccctacgagcccttacacatcgtcaccgatcaggcattaaatgctgagattcaaaaaggcgaagagggccttttggatcgggtatttagattgatagtagaggaaatcaagtttgctgatccagactggagtcaacgcatagccttagagagcctgaatgtcgattcctttgctcaagcctggtttgccgagcgcaaacaacgcgacccatttgactgggcagaaaaaaatctccaggaagtcgaacgcaataaacgagaaaaacatactgttccctggcgttatgtcattctgcgcctgcatgaagccgtacaggaaattgttccacatctgaatgaacacgaccataaacggttcagtaaaggccttgcccgggttttcatcgataattatgcggcaatccctagtgagtctattcgtcgcctacttgccttacgtgaagcgggaatcattcatattctcgccctcggtgaagactacaaaatggaaattaatgagagccgcaccgtcctgaaaacggaagacaacagctacagctttgacgtttttattgatgcccgcggacaacgtccgcttaaagtgaaagatatccctttccctgggctacgcgagcaattacagaaaacaggggatgaaatccctgatgttggcgaagattatacgttacagcaacccgaagatattcgtgggcgcgtagcgttcggcgcgttgccctggttgatgcacgaccagcctttcgttcagggacttacggcatgtgcagaaattggtgaggcgatggctcgggcggtcgtaaagcctgcatcccgtgctcgtcggcgtcttagctttgattaaaggtaaagctatcagcactcaacaaactgatgctgttcattaagacgatagcggactccggctcgaatattgttttcaccttcaatggcgacggcgaagcgaactctttcgccgtcatgatatgccagtgcggcgcttcctcctggcccgagaataatactgtcgaccacgcccgtgctcactaccgtactattttcaccgctggcaatgatgtgtacattgtcgccgctgttggcaattctggcgtttgcgccaaagctggcgatttgcaccaggtcaccattactggcgacatgacaccgttcacccaatgtacaaacgcgtactcgcattccggtattcgcaatccgactgctatctccagcgctgcttatccggctagaattaccggttacagcaacccgtgcgcgttcaccggagctgccaatgtgactgttaaagccgacacttccaatccgcacgctataacccatactggcaatttgcgcggcatacccagcggttgcgattctggcgttatcctcacaacagccgatgcgagcatgatcgtcgctgcgggcaaactgactgcaaaatggtctctctccggggtctgtggccagtttttgcatagaggaaacttcctgatgcgcgaagttttcatccgccagccattttttccacgcatactcaaccagactctccgcccagtccgtatatccttcctcaatcagtgcatgatgaatatcggcataactaccgccgcgtgggaaatggcgcaggaaccagcgatacatcaccgctccgatacgccattctcgcaggtctgcttgtgtaatgatcattcgttagtgccggtgatagccatcgaccatgcttttaaaggtttcgtgtggcgtacgccccgtggtgcaaagataaagatgaccgaagataaaaaagaggcttataaatgccagagcaaaatgtgtctgcaataaccagtatcttacgccaggaaacacatctcccacggcttgcggatagagacacagcagccccgtcaatagtaacaacggcagcaatccatacatgacaccaacataggcgacctgctgtaagggattaaatttagactgggttgttgccgggaaaggatgttcttccccctgcataatgccaaacaaataaaatcgcgtttgttttgccgctcgttccagccacccctgacgacgaatgcgatagtggtgaccattatccccaacggcattgatcagcacaaagccgagccagcatgccagtaacaaaaatccgcaaacttcatgcaccgcaaccagacttttaaccgcagttgcgcccaccatcgcaaagtgatttatcagcccactggccagcaacaatacaaagagtaacgcattgctccagtgccataatctgaccgctttgctgtaaagataaatcttctcaccatgatcggtggcacttttcttcacgccacgagcacgaagcaaggcatgcagccccagcaccaaccacatcccaaccagcaatactccggcaatgatcaaccacaccggccaaaattcgggagtgaactgtggcacatagttcgctaactggctctgaaactgttcagcatgttggctcgggttcatacattttcctttttaatcaaatgttgaccgaaccggcgatacagatgcggtttcccggcaccaggtagctgatattgatagtatttattttgctgcaaccacgcctgaatttctgggctatcttcgcgaccaaagatcaatgcgtgttccgggcaggcgctgacgcaaatgggcggaaagccttttgccagtcgggactcagcgcagaaatcacatttatctgccactttagtgacagggttaaggtagcgaacctggtacggacaagcgccaatgcaataactgcagccgatgcactggcttttttctacccgcacgatcccctgctcatcacgccagctcgcccccgtcgggcaaacgtcgatgcacggagcatcttcgcagtgctgacaactctggcgaaaaaagtgatactgcgtttcgttgtcgttatcggtgactggaatgtgtgctatgcttaaacggcttccctgagcggggacgtggttagttttacggcatgcgcgggcgcaaatattacagccattgcaccgactctcgtcatgaatcatggcataccgaacttccttttcttgcctcgtgttcgctaacagagaagacgcagaaccagtaaaaaagattactgttcccatccccagaacaaatttgcgtcgagtgaaggacatctgattatcccctaatgcagtggctgcaactgtccaccctatccatgacatctccctgaaatttcaggggttctgaaactgctctacctcgaaccattcgcataagccataagccttgccataggtcataaatcgctcgctaaacaagtacaacaccgccgtgctactctccacctgccgtatatcggcatattcaggtgcaacatccatcgcggcgatcgcggcttcaatctgcgcttcctggaagtaatatggcgcttgcatcagcatggcgactttgtaaggacgaggatacgtctggcactcaaaacgaacggcgtgtgcaatggcgcgacaaatgtcctgctccacaacttgcaaagacatcgccgcgtagttttcactcatggcctgcgtactgtaatagtaatcatccttgcttcccgtcaaacaagcgatatccgcgtagtctccgttctgcttaatgctttccagcaaaacactcagttcctcttctgcaaccaaatagggtgggctgagaaacacggcgcgcgccaccagctgcccagccgcagaatgctggcgaatgaactcagccaggatttcagcaggttctggttcggttaccgtatcaacggggtgacgcatcccctgcaaccattgccgcttcgcctcgtcaacttcgctgactttcgctaacggcaattcatcctgatggttcatcttacccattccttacgcaggcagtagattgtgtgctgccagatcggcggcaatatcttccagccccagacgctgcaatgtttcgcgggttggacaaccaagctgtgggtcccagcccatttctttgtagaacatcgtgaggctagcatgcatatcgtcacgatccattttgtcagtaccttcagtaaagaccgggatctgcggatccttgtcgaatacccaggaacagataagatcgtgttcattacgcatatctttggtttgcatcagttttaccgtgtaggcacgatgcaacgtaaaaatacgctctgcagctaaatctaatttttcctgagtcatctcttcgccggtgatcgctttgaagaatttggcttcaagcgccagatcgccccggtaattacggcttttcagcgggctaacggtcattggccagacccagttgcacagggtgacggcgttatgcaaacagacccgcaacaggctccactttgcatatttaatttttgcgtcattgattggcgtgtagtttttggtttcatcgtaagcatcttcagaaccaaaaagttctttcgccacttcacgttgcagtttcaatggcaagccggaaccaataaagttgatatgggtatgcgtcatgcagtcacggttgaacatacagttaacaatggaaccgacctgcgcactcgcttcattggcatggtgaaccggatagccaaacgggctccagagtttatttttcgcgtagccccagtactcttcacccaaattccagcgttctgcgatggcataactaccatcagccaggtgactcagctcacccacacgatgcgccagacggtagtaaaaatctttaatgaagttaacgtcacccgcttccagttgatcccagcgaatttctgcatactcttcagctggcagaacacgcttgaacacacctttgctgtaacaataagtaaagtcgcgatgcaactgcccgtagttacaccataggccgtagtcatcgaacaaattcagacccaccaggttaccaatcacacgaccatcgtctttatcttcaaaatctttcggcccgttcgggaagatggtggtatggacaaagtttgctacacaagtgttaccacctgtgctgggcacgccaaactctttcacccgaggaatattcatttgggtcatacaacggatcgggcaagagtggcagccgctcatttttactgtgtatttctctgccgccggtcctaagtcaaaaacggatttataggtacgaaagccgaccgtattctgattgcctggcggaatttcacccgtttcaatcggaccaccttcagccgcgccccaaaacagccctttacgtgctgtccagcgactcttgggatcactatactctgcccagctttgtggcgtacttggcacgacatggttgttattcgcaccaataagttcagtcatcatgtaatcattgagacgcttcatctcctgacgatcggcaatgttgacccctttcgtcccttcaaccgcaatcgctttcaggtttttgctacccattattgcgccagttcccgcaccgccgctgtggttacggctattcaacatgccagagagaggaacaaggttttccccagcctgaccaatagccgccacacaggtttccggactggtcaatcgacaaatttcttccgtcgttgcgcgcgtcccttttccccataagaaatcggctttttccaggctaactttgtcatctttaatcttcagccataccggacttttcgccttcccttcgataataatgacgtcgtatccagcgaatttcatttgcgctgcaaaaaagccacccatatgggcatcgacgactaaatttcctttggtaaaagtagaaagactggtgatatttacgcgagaactacagggggcaccagatccagttaatgggccggtagcaaagactaatttattcgcttcatcgaaaggtttcgtgcctggcggtacttcgtcatacataattttgtagccgaagcccatgccaccgacaaaacttttaaacttactggaatcttcgagggtaatatttcctgtcgtgagattgactcttaatatattacctgtccaaccgttagccatgattttttcctttgcaagattcacacagtaatatctttccactcgataatttttaacgcccctgttgggcaggcgtttgcgcattcaccgcataacacacatttgctggattttttactttcggtatttacggtggccatcatccacgggcatgccgtagtacaggcgctacagccaatacagcgtttatgatcgacggtaatacagccttctttctgctgccaggtaatcgcaccaatcgggcagacgttcatgcattgcggctctttgcattgacggcaggtgtccgcggtatagttgagatcgccatacaggccgccgccagagccaaccccgttgtcgccaaagaaataattgcgatggattttgatacgggagaagaatgtccctacactgccatcgttgaagttggtacaagagatttcacagcggtggcaacccgtgcatcgcgctcgctgggtcaccagcacccctttgggggtatttatcaaccctactgtgccgctatcaatatcttcctgtttgcaacccaaaagactcagtaacgcaggggcaattgttagaccagcaaggccttttccacttatacgcaagaattctaatcgcgttaagccaatatctaatagtggacgatcaaccgggttcatttatttcgcatcctcttcgcaaacacagtgctgacaattcagcagcctgatattaagcattcaactaatacgctgctgactctgtccccaacaccagatattttccctaacccgatagtgtatgagaaaagattaacgccgataaactaatcctttatggttaggagaaaaaataatgtgattattctgagcccttaacattgatcgttatcaattaaaattacaaagcaagaaattataagtgaactgatatttattatcatttgaaataaatttaacttaagcgacaattatttgtgactttcattgcagaaaataaaaataacattatcgctataaattaaaatacataccgaaattcgtataatttcagcagttgttatttagaatgattaactggaccgcaactgaagcaagaatatcaggatgaagcttaccgcctcatcctgaatggtcattttaccagtgcgttaatgacggtttccatcgcctgcttttccagctcactgcgctgaatgcgtttattggctaatgctgtacgtaatacgcctgcgataacaatatgctttggttcctgccccagatcgcgcatttccagcacaactttaccgacaactctgcacatttctcggtacagttcatcctcttttgtccgatttcccattctttatacctatttatcatgccaactatcagcatatatcaatctaaccaattaaacaaaaatcaaacaaaatcagacaaataacgcgataaattattttaactgtagcaattgagcgatgatatatttatacaccggatgaactttcacttatcctcacactgacaacttcggcaccagacgttgcgcaaacagtgaagtttttgcgtaaccttttccctggaacgttaaatctttgataacaatttattgtctaacaagttgtatattttttgaaacgctgtttttgttttccttttggattaatttcagcgtataatgcgcgccaattgactcttgaatggtttcagcactttggactgtagaactcaacgactcaaaaacaggcactcacgttgggctgagacacaagcacacattcctctgcacgctttttcgatgtcacctatccttagagcgaggcaccaccactttcgtaataccggattcgctttccggcagtgcgcccagaaagcaagtttctcccatccttctcaacttaaagactaagactgtcatgaaaaagaccaaaattgtttgcaccatcggaccgaaaaccgaatctgaagagatgttagctaaaatgctggacgctggcatgaacgttatgcgtctgaacttctctcatggtgactatgcagaacacggtcagcgcattcagaatctgcgcaacgtgatgagcaaaactggtaaaaccgccgctatcctgcttgataccaaaggtccggaaatccgcaccatgaaactggaaggcggtaacgacgtttctctgaaagctggtcagacctttactttcaccactgataaatctgttatcggcaacagcgaaatggttgcggtaacgtatgaaggtttcactactgacctgtctgttggcaacaccgtactggttgacgatggtctgatcggtatggaagttaccgccattgaaggtaacaaagttatctgtaaagtgctgaacaacggtgacctgggcgaaaacaaaggtgtgaacctgcctggcgtttccattgctctgccagcactggctgaaaaagacaaacaggacctgatctttggttgcgaacaaggcgtagactttgttgctgcttcctttattcgtaagcgttctgacgttatcgaaatccgtgagcacctgaaagcgcacggcggcgaaaacatccacatcatctccaaaatcgaaaaccaggaaggcctcaacaacttcgacgaaatcctcgaagcctctgacggcatcatggttgcgcgtggcgacctgggtgtagaaatcccggtagaagaagttatcttcgcccagaagatgatgatcgaaaaatgtatccgtgcacgtaaagtcgttatcactgcgacccagatgctggattccatgatcaaaaacccacgcccgactcgcgcagaagccggtgacgttgcaaacgccatcctcgacggtactgacgcagtgatgctgtctggtgaatccgcaaaaggtaaatacccgctggaagcggtttctatcatggcgaccatctgcgaacgtaccgaccgcgtgatgaacagccgtctcgagttcaacaatgacaaccgtaaactgcgcattaccgaagcggtatgccgtggtgccgttgaaactgctgaaaaactggatgctccgctgatcgtggttgctactcagggcggtaaatctgctcgcgcagtacgtaaatacttcccggatgccaccatcctggcactgaccaccaacgaaaaaacggctcatcagttggtactgagcaaaggcgttgtgccgcagcttgttaaagagatcacttctactgatgatttctaccgtctgggtaaagaactggctctgcagagcggtctggcacacaaaggtgacgttgtagttatggtttctggtgcactggtaccgagcggcactactaacaccgcatctgttcacgtcctgtaatattgcttttgtgaattaatttgtatatcgaagcgccctgatgggcgctttttttatttaatcgataaccagaagcaataaaaaatcaaatcggatttcactatataatctcactttatctaagatgaatccgatggaagcatcctgttttctctcaatttttttatctaaaacccagcgttcgatgcttctttgagcgaacgatcaaaaataagtgccttcccatcaaaaaaatattctcaacataaaaaactttgtgtaatacttgtaacgctacatggagattaactcaatctagagggtattaataatgaaagctactaaactggtactgggcgcggtaatcctgggttctactctgctggcaggttgctccagcaacgctaaaatcgatcagctgtcttctgacgttcagactctgaacgctaaagttgaccagctgagcaacgacgtgaacgcaatgcgttccgacgttcaggctgctaaagatgacgcagctcgtgctaaccagcgtctggacaacatggctactaaataccgcaagtaatagtacctgtgaagtgaaaaatggcgcacattgtgcgccattttttttgtctgccgtttaccgttactgcgtcacgcgtaacatattcccttgctctggttcaccattctgcgcactctctacactaggcgcattgctggctgcgggagttgctccactgctcacgctaaccggataccctgcccgacgatacaacgctttatcgactaacttctgatctacagccttattgtctttaaattgcgtaaagcctgctggcagtgtgtatggcattgtctgaacgttctgctgttcttctgcgcttagtggtcgatgtacttcaacataacgcatcccgttaggctccacggaatatttcaccggttcgttgatcactttcaccggcgttcccgtccgcacgctggagaacaaggctttaatatccggtgcattcatgcgaatacacccactactgacgcgcaaaccgacgctgtccggcgcactggtaccatgaatgaggtattcgccattaccatgcgcgaggcgcagtgcgtaacgtcctagcgggttatttggtccggcaggaacgactggcggtaatttaatgccacgctccaggctacgctgacgaatgcctgccgtaggcgtccaggttgggttagggattttctgcccaacacgcgtttccatcaccggcgtttccagcccctgcaatccaatacctattggataaacctgcacaatattttctcccggcggataataataaaggcgcagctctgcaaggttaacgataatcccctgacgcggtgcatcaggtaataacagttgactaggaatagttatcgtcgtaccaggttttggcaccggggcgatagtgttattggcttcaaggatcaacattgccgcagtatcaaaacgtcgggcaatagcctgaaggtttttatccccttcttgcaccgtatacgtttgattttgcccaaccagtcggcttccggttggtggtagcggataatcaaccgcccaggcagcctggatggcgctaaaagcgccgataagcgtgagtgtaagcaaagacgcgcgtttcattgtaaacctcctgtatttgccggagactcacgctgaaacgtcggatggcgcttatgttcacctgaaaccaaaacactcctgtgcaggtcagtgtaaacattgaccatccggcaatgtgagccaaccggatgaaagctgtccttttagtttagctaagtgcagcggctttggcgcgaattgcgcgaatcatcgcttccagaccttgactacgagatggggtgagatgttgggtgagcgccattttttcaaaccacggacgcacatcgaaattgacaatatcctgcggcgtcatctgatcgtagagaataaagacgaccgcaataagccctttcacaatcgccgcatcgctgtcgccctgtaattcaataattccctgggcattctggcgcatgacaatccacacctgactctgacagccctgaatgctattttgtggacttctgtcttcgtcgcgtaattctggcagacgctggcccagctcaataatgtagagatatttctcttcccagttggcgcagcgtaaaaaattacgcagcaacttttctttatccggcaataaagccatagtgcctccctgttatcccagcaaacggtgaatacgttgcaggccggtcaccagacgatccacttcttcatgggtgttatacatggccaggctcgcccgacacatcgcagggacgttgtaataggccatcaatggcattgcgcagtgatgtccggtacgcacagcaatgccgtaattatcgagaaaactgccaacatcataggcgtggtgtttaccgagattaaaagcaataacgccaagcctgttttgtgggccatagagagtgagatccggtacagattccagctgacttagcgcataatgcatcagattctgttcatactcggctatgttattaagccccagcgcgctaacatactccagcgccgcgccaagaccaatgatgcccccggtattgggtgtaccggcttcaaaccgccatggtgctttggtccaggtagtgccttcactcaggctgacggtggcgatcatagaaccgcccccttcccacggcggcatctcctgcaacaaggcttctttcacataaagaatgccaattccggtggggccatacagtttatgcccggagaacacgtaaaagtcgcaatccagcgcctgaacatccaccggatgatgcatcaccgcctgagcgccatccaccagcacttttgcgccatgctggtgcgcaagcgtgatcatttccgccagtggattttctgtgccaagcacgttggagacatgagtaattgccagcaggcgagttttctcatcaaacagcgtaggcagcgtctccagttgcaacgtaccatcgggattgagcgggatcacacgcagctctgcgccaacgcgtgcgcaaagcatctgccagggaacaatgttagcgtggtgctccatctgactgatgatgatgttatcgcccgcccgcacgttgctgttgccccagctattggcgaccagattgatcccttccgtcgtgccgcggacgaacaccagctcttccgcgctacgggcattaataaacaggcttgcccgcttgcgcacgttctccattttctcggtcgcctgggcgcttaaggtatgaataccacgatgcaccgccgcgtagccatgacgataaaactcggcctcggcgtcaatcacctggctcggtttctgcgcactggcggcgctgtcgagataagccagcggcaaaccgtttacctcacggctaagcaccggaaagtcggcccgcactttgtcgacggaaaaaatcatcttgcacctcctggcagccgttgaccgattcgggccagcacctgctgtttaagcccctcatcacgcagtgcttccgtcagttcggcagcgaaggcgtaaatgatcatctgctgggcatcctgctgattgatcccgcggctgcgcagatagaatatctgttcatcatcaatacgccccaccgtcgcgccgtggctgcatttcacatcatctgcatagatttccagctgcggtttcgtatccacttccgccagtttgcccatcagcagattgttgttggtcatctgaccatccgttttgatggcgtgctgcgcgacgttgatcaaaccgttaaataccgcgcggcctttgtcgctgacgatagttttgtgcaactgtcggctgttacaaaaacctttattgtgttccagccaggtacgggtatcacacacctcgtttttcaccggcatcgccaggctattgatccgcagcgtgctgttttcgccattgagttgcgtactggtgttgtgtcgtaacactgcgccacccagcaggaaactgtggctaaatgcggtggcatcctcagccagcaacaaatcgttatgagcaaagtggtgactgagcgggttttcaaacgccagcttgatatgctgcaagtgggcattcgctgcgacgttgatagtgaaccgtgccccggtaaaatgacgagcatcattcaggctgacaaaatgttcgatcaccgttgcttcggcaccttccgccagatccagatgatgtcggtaatgggcagtgttcacctcttcacctgccacgccctgggtgatatgcattaacagcaatggctttgccggccgttgaccgcgcttcacggcgatatgcgtcacgctttgtgccaggctttccgtcaaatgcagaaacacttccgcctgaatagcgtcgggtaaaccctgacggtcgtcgttaatgctcacttcatatccgctgccttcagttgcatcgctcagtgcgggcacgtaacgcccatcgacaaacaccagccgcacggagtctaacgttaacgctaaggcatcacgctgctgtggggatatctctcccgcaatgctgacaaactggctattgatcagcccttccagcggcgtatatttccagttttcatgtttacgtgtcggcagtccggtacgcagcaattgttgtaaatgctgctgtgcttgcggggagcgttttgtcccttcagcttcaaacaagtgatgccactgttgcagcgcgttactgctgttcggtaagccagccataaccctgctcctccagttgtttgaccaacgtgaaatcgccggatttcacaattcgtccctgatatagcacatgaacgtaatcaggcttgatgtagtcgagaatgcgttggtagtgcgtaacaatgatgaaactgcgcttgccatcacgcaggctgttcacgccatcggcgaccacttttaatgcgtcaatatccagcccggagtcgctctcatcaagaatgcataactccggttccagcaccgccatttgcaaaatatcgttgcgctttttctcgccgccggaaaaaccaacgtttacgctacgggttaataaatcttccggcatcttcaggagagcgattttctcttccatcaaatcctgaaaatcaaagcggtcgagcgtttcctggccgcgatagctgcgcaccgcattaagtgccgtttgcaggaaaaactggttactgacacctggaatctccaccggatactggaaggccataaagatgccttcgcccgcgcgatcttccgggctcagcgcaagcaaatctttgcctttgaactcaaccgtgccgcccgtcacttcataatcttctcgcccggcaagcgttgcgcttaaggtacttttgccgctaccgtttggccccataatggcgtgaacttcgccgggatgaacgtcgaggcttaatccgcgcaggatagctttatcttccacgctgacgtgtaaatctttaatacttaacatgtttattccttatccgacgctgtgttcaagactgatggcgaggagtttttgtgcttcaacggcaaattccaacggcagctcgctgaacacgtctttgcagaaaccgttaacaatcatgctgatggcgtcttcttcgctgatcccgcgttgcaggcagtaaaacagttgatcttcaccaatacgacttgtcgttgcctcgtgttccagttgcgcactattgttacgacactcaacatacgggaaggtatgcgccccacaattagcgccaatcagcatactgtcgcactgagtgaaattgcgcgcattggttgccgtcggcatgattttcactaagccgcgataactgttctgactatgtccggcagagatccctttgctgataatggtgcttttggtgtttttaccgatgtggatcatcttggtgccggtatccgcttgctgatgaccgctggtcagcgccacactgtaaaactcaccaatggagttatcgccgcgcaaaatgcagctgggatatttccacgtaatcgcactcccggtttcactttgcgtccaactcattttgctgttttcgccttcgcacaaagcacgcttggtgacgaagttgagaataccgccggtgttgttatcgccaggaaaccagttttgtaccgtggaatatttcacctcggcgtttttatggatgatgacttccaccactgccgcgtgtaactgatagctgtcacgcaccggagcggaacagccttcaatgtagctgacgtagctgtcttcgtcggccaccagaatggtgcgctcaaactgcccggttttttctgcgttaatgcgaaaataggtggaaagttccatcgggcagcgcacgcctttaggcacataaataaacgtaccatcagaggctaccgccgcattaagcgcggcaaagaagttgtcattccccggcaccacggtgccgagatatttacgcaccagttccgggtgatcgtggatcgcctcaccaaaggaacagaaaataattccctgctccgccagtttttcgcgataagtagtggcaacgctaacactgtcgaaaatggcatccaccgccacctctttgccttcccgcacgggaacgcccaactgctcaaacgccgcctccacctctttacttaaaaaggcgttcgcgccagtttgctgcaccgcgccaggttcagacgcgcaagtgtcgtcacaattaccgcagcttggtgcactgtagtagctgtaatcctgataattcagcttgtcgtagtgcgctttcaaccagtgcggttcttccatctccagccatgcgcgataggcgtttagacgaaactccagcatccactccggctcattacgcttcgcgctaattgcgcgcaccacctcttcgtttatcccctttgccagctcatcggtggctaactgggtgaagaatccttctttataattcagcgggccgccggtccaggttttgacatcgtcagttgcttcagtattacgagacatagtaccgcttataccccaaagctttcgccacagccacattcattctgggctttagggttgtgaaatttgaatatctgattaagtccttcacgaacgaaatcgacttccgtgccatcaataaacggcatcgcttgcagcgggacaaacagcttcgcgccgtcgtgttcaaacagcagatcgtctttgtccggctcgctaacactgtcgagcacatagccaaagcccgcgcagcccgtttgcttcacgcctaagcgcacgccgaccatacccggctgctttgccaccagctcacggatgtgtatcgccgctgcgggtgtcagcgttaagccttgccaggcgaaatcttgtgggttaaaggttccactatgcatgtccatcgatttacctcacttcatcgctttcagcgtataacagcatgttagtgataatgattatcagttcaacccagcaaacgcaggggctttaccgtaaaacatgctttttgcctgcttttaataagcatagaccctgatgtgtgggttaacaggcacgctaagaattaggtatctcattgttagataatggttattatctaaggagcattaaggctgtgatgaaaaagaaaaagttgtattgaaaatgactatttaagagataggtaaaaaagtgcagcgttcagaaataagaaaacccttaagtctgtgcgacacaggcttaagggtttctaccccatccggcgcttatctccggcactctcagtggcttagctcttgaaggggcgataagaataatctcataaagctaacccgccgttttaacacaaactgcgattagtattatttttgaacaatatcaggcggtagataagcagtattaagaaggtcatcgaacctggacggaggttaatccaggtcgatttggcgaacttgcggcattaagtcaggatcaatgcacgcccagacgccaggcaaagtagatttcttcttttaattcagcagaagagagagtaagcaggtcagcaaattcaagttctagttgtttcagacgtttgagatattgggcaggactaagattgctctggtcacggcgtaaaaattcaatggccagctgggtgggatcaagttgagtagacatagcatcctcgcttttagacaagacctgcacagtataccaccgtttactgtgcagataatgaccaaaagcaatatgcgtcacacttttctggtgacaacgtcacaaaatggcggtcgtcaatcgactgctacagcacaaacgccctttctcatcgaagatttcaatctgccagacctggtgacggctaccgagatgcaacggtttgcatacgccgcgcacccgcccttctcgtgcgctgcggacgtggttagcattgatttccagaccaaccactttttgctcaccttcggtacataaataaccggcaacggaaccgatactttcggccagtaccacggatgctcctccatgcagcaacccgaaaggctgctttgtccggctgtctactggcattgtcgcttcaagggtgtcatcaccaatatgttcaaagcgaatatccaggaaccccaccatgtttccttcacccatagcattcagtgcttccagggtgattttccgtttccatatcatttaataatctccagtaaagcctgcacaggatggcgtacccccgtgccttcaacccgttttacctggctacggcaggaatatccggtcgccagacagcggttacgcggcagtcgctgcatagcctgatgccaggataactcatagatcccgaggctattttcatggtttttcgcttcatgtccgtaagtccctgccatgccgcagcaacccacgctgacattttccagtttcgcgccaaaacgggcaaatatcgcggcccattgtgctggcgcacccggcaaggcggtaacttcggtacagtgaccaaagaaataccaactttcaccgctgactgtagccactggctgactctcaagtgcgcttgccagccattcattcgccagtaagacgttaaactcgccacgctcctcgcccagcgccagtttatattcatcgcgataacaaagtaccagcgccggatcgacgcccaccattggcatacccagcttcgccatacggttgaggaaatccgccgtctttttcgccgtcttcgcaaaacgattaagaaaacctttaatatgctgggctttgccatttgggctaaatggcagtaacacaggctggaaacctaatttttcgaccagacggacaaaatccgccaccacttgcgcatcgtaatagctggtaaaggggtcctgcaccaccaacactgtgcgcgctttctgctctgcattgagagattcaagctgttccagcgtcatgtttgcgctgcgatgccccaccatttgttgttgtaggctggggacgctcagcagcggcaaatcaaccatgccgatatgtttttcgctgagtttgcgcaccagcggctggttaatgaagaagttaaaggttttcggcgcgcgtgccatcagcggcgcgtagctctcgaccgtagcgacgaggtggtcgcgcagcgggcgtaaataacgggtgtgatagagctgcagaaaacgagagcgaaactccggcacatcaattttgatggggcactgggtgctacacgctttacaggccagacagccgctcatcgcctctttgacttcgtgactgaagtcatattcgcctttattcgcatgccagctattgcgcgtgcgggcaattaacgtccgcaaactgacgccggattcaggcagttcttgttccagtttgagtggatcaacgccgcgatccgccaacaaacgcagccattcacgcaccagcgttgcgcgccctttcggactatgaatccggttctgggtgatcttcatgctcggacacatcggactacgggcatcaaagttgaagcataaaccgttgccgttacactccatcgcaccgcgccactgctggcgtaccgcaatggggatctgccgatcgaatgtaccgcgcttcaccgcgtccactttcatcatcggcgcatcgagaccttctggcgggcaaatcttccctgggttgagtcggttatgcgggtcaaatgccgctttcactttgcgcagttctgcaaaaagttcctcaccgaaaaacgccgggctgtattcagcgcgaaaacctttgccgtgctcgccccacaacaaaccaccgtatttcgcagtcagcgccaccacgtcatcagagatttgcttcatcaaaatctcttgttgaggatcgcacatatccagcgctggacggacgtgcaagacacctgcgtcgacgtgaccgaacataccgtagcttaagccgtggctgtcgagcagcgcgcgaaattcagcaatataatccgccaggtgttccggcggtacgcaggtatcctcagcaaacggaattggcttagcggcacctttggcattgccaagcagaccaacggcttttttgcgcattgcatagatacgttcaacccccgccagctcacggcacacctgccagccgatgacacctgcttgatgactggcgatcagctcatccaaccgcgcacagagtgcatttacccgctcatcaatcagcgcctcatcatcaccagcaaattccacaatgttcagcccgagcatctcttggtcaggcacatcggtaatcaactcgctgacggaatgccagacaatatcttcccgcgccagattcagcactttactgtccaccgtctctacgctaagcgcccgcgcctcaaccataaacggcgcgttacgcagcgcagagtcaaaagagtcatatttgacgttcaccagacggcgcactttaggcaagcgtgtaatatccagccgcgcttcggtaataaaggccagcgtcccttcactacccgtcagaatgcgcgtcaggtcgaactcggtcatctcatcgttaaagacatgacgcagatcgtaaccggtaagaaagcggttaagtttggggaagttgtcgataattaactggcgttgctgacggcaacgttgataaaccgtgttataaattcgcccgattgtggtattggatttacccagcgtttccgccaattcgacgggtaaaggttgcgtatcgagaatatcgccccccaacaacaccgcgcgtacgccaagtacgtgatcactcgttttgccatagaccaggcttccctgaccggatgcatcggtattgatcatcccaccgagcgttgcccggttgctggtgctaagttccggcgcaaaaaagtagccgaacggtttcaggtactgattgagttgatcttttatcaccccggcctcaacgcgcacccagccctcttcagggttaatttcgatgatgcggttcatatggcgggacatatcaacaataatcccctggttgagcgcctgaccgttagtgccggtgccgccgccgcggggggtaaagatcaggctactatagcgttcctgcgcggcaagacgggcgatcagcgccacatctgcggtactacgcggaaataccaccgcatcggggagaagttggtaaatactgttgtcggtgctcattgtcagacgatcggcataacttgtcgccgtatcgccggtaaaaccttgttgctccagctcttgcaaaaaattaagcaccagttgaacgacgccgggtgcctgggaaatctgtggaatcattatattgaccctttcctgcggtctgtgatgtaggtcgatacactattctttcaggctgctgcaatagcgcactgaaaggtgatgtttgtttactctatggatttcgtgttgcaggaaggcggcaagcgagtgaactccaggagcttacaatagtaagtgactggggtgaacgaacgtagccgcagcacatgcaacttgaaatacgacgagtaaatcgtttgcgtgttgcctgagttgttgtaccacatttttttctaacacgcccatcagaattaagggcagaatcggcctgttaaaaaccgctgaaattgctcatcattatgcaggtgagtttcgcgtgttcacgtcgcgtcgacgatttgacgcacaaaaaaggtgaaaagtagttatggtaaatgttcgtcagcccagggatgtcgcacaaattctgcttagcgtgctgtttttagccatcatgattgtggcatgtctgtggattgttcaaccctttattctcggctttgcatgggccggtacggtggttatcgccacctggccggtattgttacgtttgcaaaagatcatgtttggccgccgctctctcgccgttctggtgatgacgctgttattagtgatggtgtttatcatccctattgctttgctggttaacagtatcgtcgacggcagcggcccgctaattaaagccatttccagcggtgacatgacgttacccgatctggcgtggcttaataccattccggtgattggcgcgaagctgtatgcaggctggcacaacttgctggatatgggggggacggcgatcatggcgaaagtccgcccttatattggcaccaccaccacctggttcgttgggcaggcggcgcatatcgggcgctttatggtgcattgtgcgctgatgcttctcttcagtgccctgctgtactggcgcggtgaacaggtggcacaaggcattcgccattttgcaacccgtctggcaggcgttcgcggagatgccgccgtgctgctggcggcacaggctatccgcgcggtggcgctgggtgtggtggtgacggcgttagtacaggcagtgcttggcggtatcggcctcgccgtatccggcgtaccttatgcaacgttgctaacggtgttaatgatcctctcctgccttgtccagcttggcccgttgccggtactgattccggcgattatctggctctactggactggcgataccacctggggaacggtattgttagtgtggagcggtgtggttggcacgctggataacgtcatccgcccaatgttaattcgcatgggtgccgatttaccgctgatcctgattctctctggcgttattggtggtttgattgctttcgggatgatcggtctgtttattggtccggttctgttagccgtttcctggcgtctgtttgccgcgtgggtggaagaagtcccgccgccgacggaccaaccggaagaaattctcgaagaacttggcgaaatcgagaaaccgaataagtaatttctcatcaggcggctctgccgcctgattgttaaccaccgctaattgatatttgcttgctcttccccatattttcctgcttaccgccattcagctggtagtacctgtcgcaaattctttacagtttttaaactaatgagacgaatctgatcgacgcaaaaagtccgtatgcctactattagctcacggttataaatcaacatattgatttataagcatggaaatcccctgagtgaaacaacgaattgctgtgtgtagtctttgcccatctcccacgatgggcttttttttaacatttttccgcttcgctacctcgcccctcactctttccaataatgttgcacaagatactgtgactctcttcaagccgtcagcaggctgataatgttatttatattttattgtttatttcatgcagccattacacgatgaacgcttatgaactccaggcactccgccatatttttgccatgactattgatgaatgcgcgacctggattgcccagaccggtgacagtgaaagctggcgtcagtgggaaaatggcaagtgtgccattcctgatcgtgtagtcgagcaactgttggctatgcgtcagcaaagaaaaaaacatcttcatgccatcatagagaaaataaataaccgcatcggcaacaacaccatgcgttttttccccgacttaaccgcatttcaacgagtctaccctgatggcaattttattgactggaagatctatcaaagcgtagctgctgaattatatgcacacgatctggagcggctttgttaatttttccacagaaaggaattgtcgttgttacaacaataatgaacggatgctgacacaacatcgcttcactttttaaagcacctttgctaagtagaacctatgaaaaatccctatttccctaccgcacttgggttgtattttaattacctggtgcatggtatgggcgtccttttgatgagcctgaatatggccagcctggagacactttggcagactaatgccgcgggtgtcagcatagttatcagtagcctgggcattggtcgattaagtgtcttgctttttgcaggattattatccgatcgctttggtcgccgcccttttatcatgctcgggatgtgctgctatatggccttcttttttggcatcctgcagaccaataacatcattatcgcttatgtttttggctttctggcgggaatggcaaacagttttctcgatgcaggcacttatcccagtttgatggaagcttttccacgcagtcctgggacagccaatattttaattaaagcatttgtttccagcggacaatttttattaccgctaatcattagcctgttagtgtgggctgaactgtggttcggttggtcctttatgattgctgcaggcattatgtttattaacgctctgtttttataccgttgtacgttcccaccccatccgggtcgtcgcttacctgtcataaagaaaaccaccagctctacggaacatcgctgtagtattatcgatttagccagttataccttatatggctatatcagtatggcaacgttttatctggttagccagtggctggcacagtacggacaatttgttgcaggcatgagttacactatgagcatcaaactactcagtatctacaccgtgggtagcctgctttgtgtatttattaccgctccactcattcgtaataccgttcgcccaacaacattactgatgctgtacacctttatcagttttattgctctgtttaccgtctgcctgcatcccacattttatgtggtgataatatttgcttttgtcattggttttacctctgctggaggtgttgtgcaaattggcctgacgttaatggctgaacgtttcccttacgctaaaggtaaagctacagggatctattacagtgcgggcagtattgcgacctttactattccgttgattacggctcatctgtcccaaagaagtattgccgatattatgtggttcgataccgccatcgctgccatcggttttttactggcactgtttatcggcttacgcagccgcaaaaaaacgcggcatcacagcctaaaggaaaatgtcgctccgggtgggtaatgcaatattcttttcaggtcatgcaagatcttacggataaataactctttctgcgctaactaaggaaaatcgcgatcaaaaacaaactatgacatgcaatattcctggaaacataaactttatgccatgtacccagggaaaatcatcttcagtatagtaattatgtaaaccgtcggagaacaatacgtacggtaacgaaattatctttcagcaaggagctgtgaaaatgtctcaaaataaggctttcagcacgccatttatcctggctgttctttgtatttacttcagctacttcctgcacggcattagtgttattacgcttgcccaaaatatgagttctctggcggaaaagttttccactgacaacgcgggcattgcctacttaatttccggtatcggtttggggcgattgatcagtattttattcttcggtgtgatctccgataagtttggtcgtcgggcggtgatattaatggcagtaataatgtatctgctattcttctttggtattcccgcttgcccgaatttaactctcgcctacggtctggcagtgtgcgtaggtatcgctaacagtgcgctggatacgggtggctaccccgcgctcatggaatgctttccgaaagcctctggtagcgcggtcatactggttaaagcgatggtgagttttgggcaaatgttctacccaatgctggtgagctatatgttgctcaataatatctggtacggctatgggctgattattccgggtattctatttgtactgatcacgctgatgctgttgaaaagcaaattccccagccagttggtgggcgccagcgtaactaatgaattaccgcaaatgaacagcaaaccgttagtctggctggaaggtgttagtagcgtactgttcggtgtagccgcattcagcaccttttatgtgattgtggtgtggatgcccaaatatgcgatggcttttgctggtatgagtgaagctgaggcattaaaaaccatctcttattacagtatgggcagcttggtctgtgtctttatttttgccgcactactgaaaaaaatggtccggcccatctgggctaatgtatttaactctgcactggcaacaataacagcagccattatctacctgtacccttctccactggtgtgcaatgccggagcctttgttatcggtttcagtgcagctggcggcattttacagctcggcgttagcgtcatgagtgagttttttcccaaaagcaaagccaaagtcaccagtatttatatgatgatgggtggactggctaactttgttattccactgattaccggttatctgagcaacatcggcctgcaatatatcattgttctcgattttactttcgcgctgctggccctgattaccgcaattattgtttttatccgctattaccgcgttttcattattcctgaaaatgatgtgcggtttggcgagcgtaaattttgcacccggttaaacacaattaagcatagaggttaaaggagttaattatggatgttaccgcaaaatacgaattgattgggttgatggcctatcctatccgccacagtttaagccccgaaatgcagaataaagccttagaaaaagcgggattgccatttacctatatggccttcgaagtggataacgatagctttcctggagcaattgaaggattaaaagccctcaaaatgcgcggaactggtgtaagcatgccgaacaaacaactggcgtgtgaatatgttgatgaattaacaccagctgccaaactggtgggggccatcaacaccatcgttaatgatgatggctatctgcgtggctataacaccgacggcacgggccatattcgcgccattaaagagagcggttttgatatcaaaggcaaaacgatggtgctgttaggggccggtggtgccagtacggcaattggcgcgcagggggcaattgaaggtttaaaagaaattaaactctttaaccgtcgggatgagttcttcgataaagccctcgccttcgcgcagcgggttaatgaaaacaccgattgtgtcgtcacggtcaccgatctcgccgatcagcaagcctttgctgaagccctggcttccgccgacattttaaccaatggcacaaaagtgggtatgaaaccccttgagaatgaaagtttggttaatgatatcagtctgttacatccgggacttctggtcactgaatgcgtgtataacccgcatatgacgaagttattgcagcaggcgcaacaagctggttgcaaaacgattgatggatacggcatgttgttgtggcaaggggctgaacagttcacattatggactggcaaagatttccctctggaatatgttaaacaggtcatggggttcggtgcctgacaggctgaccgcgtgcagaaagggtaaaaaatgaaaaccgtaactgtaaaagatctcgtcattggtacgggcgcacctaaaatcatcgtcagcctgatggcgaaagatatcgccagcgtgaaatccgaagctctcgcctatcgtgaagcggactttgatattctggaatggcgtgtggaccactatgccgacctctccaatgtggagtctgtcatggcggcagcaaaaattctccgtgagaccatgccagaaaaaccgctgctgtttaccttccgcagtgccaaagaaggcggcgagcaggcgatttccaccgaggcttatattgcactcaatcgtgcagccatcgacagcggcctggttgatatgatcgatctggagttatttaccggtgatgatcaggttaaagaaaccgtcgcctacgcccacgcgcatgatgtgaaagtagtcatgtccaaccatgacttccataaaacgccggaagccgaagaaatcattgcccgtctgcgcaaaatgcaatccttcgacgccgatattcctaagattgcgctgatgccgcaaagtaccagcgatgtgctgacgttgcttgccgcgaccctggagatgcaggagcagtatgccgatcgtccaattatcacgatgagcatggcaaaaactggcgtaatttctcgtctggctggtgaagtatttggcagcgcggcaacttttggtgcggtaaaaaaagcgtctgcgccagggcaaatcagcgtaaatgatttgcgcacggtattaactattttacaccaggcataagcaataatatttcggcgggaacaccctccccgccgaactaaaaaatatattcaatcgtatttaataaaaatatttcgtgagtctctgtgcgctaattctccatttggcgtagggaaaatcacatctgaatcaggaattaacaatgaaacctgtaaaaccacctcgtattaatggacgagtgccggtcctgagcgcacaggaagcggtgaattatattcccgacgaagcaacactttgtgtgttaggcgctggcggcggtattctggaagccaccacgttaattactgctcttgctgataaatataaacagactcaaacaccacgtaatttaagcattattagtccaacagggcttggcgatcgcgccgaccgtggtattagtcctctggcgcaagaaggtctggtgaaatgggcattatgtggtcactggggacaaagcccgcgtatttctgaactcgcagaacaaaataaaattattgcttataactacccacaaggtgtacttacacaaaccttacgcgccgccgcagcccaccagcctggtattattagtgatattggcatcgggacatttgtcgatccacgccagcaaggcggcaaactgaatgaagtcactaaagaagacctgattaaactggtcgagtttgataacaaagaatatctctattacaaagcgattgcgccagatattgccttcattcgcgctaccacctgcgacagtgaaggctacgccacttttgaagatgaggtgatgtatctcgacgcattggttattgcccaggcggtgcacaataacggcggtattgtgatgatgcaggtgcagaaaatggttaagaaagccacgctgcatcctaaatctgtccgtattccgggttatctggtggatattgtggtggtcgatccggatcaaacccaactgtatggcggtgcaccggttaaccgctttatttctggtgacttcacccttgatgacagtaccaaacttagcctgcccctaaaccaacgtaaattagttgcgcggcgcgcattattcgaaatgcgtaaaggcgcggtggggaatgtcggcgtcggtattgctgacggcattggcctggtcgcccgagaagaaggttgtgctgatgactttattctgacggtagaaacaggtccgattggcggaattactagtcaggggatcgcctttggcgcgaacgtgaatacccgtgccattctggatatgacgtcccagtttgatttttatcacggtggcggtctggatgtttgttatttgagttttgctgaagtcgaccagcacggtaacgtcggcgtgcataaattcaatggtaaaatcatgggcaccggtggatttattgatatcagtgccactagcaagaaaatcattttctgcggcacattaactgcgggcagtttaaaaacagaaattaccgacggcaaattaaatatcgtccaggaaggacgggtgaagaaatttattcgggaactaccggaaattactttcagcggaaaaatcgctctcgagcgagggctggatgttcgttatatcactgagcgcgcagtattcacgctgaaagaagacggcctgcatttaatcgaaatcgcccctggcgtcgatttacaaaaagatattctcgacaaaatggatttcaccccagtgattagcccagaactcaaactgatggacgaaagattatttatcgatgcggcgatgggctttgtcctgcctgaagcggctcattaacaggagtataatgatggatttttctttaactgaagaacaagaactgctgctggccagtattcgcgaactgattacgactaactttccggaagagtatttccgcacctgcgatcaaaacgggacatatccgcgtgagtttatgcgggcgctggcggataacggtatttccatgcttggcgtgccggaagaatttggtggtatccctgcggattacgtcacccaaatgctggcgctgatggaagtgagtaaatgcggtgctccggcatttttaattaccaacggtcaatgtattcacagtatgcgccgtttcggttctgcagagcagctacgtaaaacggcagagagcaccctggaaacgggtgatcccgcctatgccctggcgttgacggaaccaggtgctggcagtgataacaacagtgccactaccacttacacgcgtaaaaacggcaaggtctacatcaacggacaaaaaacctttattaccggtgcgaaagagtacccgtatatgctggtgctggcgcgcgatccgcaaccgaaagatcccaaaaaagccttcaccctgtggtgggtcgactccagtaagcccggcattaagattaacccgctgcataaaatcggctggcatatgctcagcacctgcgaagtctatctcgacaacgtggaggttgaagagagcgacatggtgggcgaagaaggaatgggtttcctcaatgtgatgtacaactttgagatggagcgcctgatcaacgccgcgcgcagcaccggctttgccgaatgcgcctttgaagatgccgcccgctatgccaaccaacgtatcgcttttggtaagcccattggtcataaccagatgatccaggaaaaactggcgctgatggcgattaagatcgacaacatgcgcaacatggtgctgaaagtggcatggcaagccgatcagcatcagagtctgcgcaccagcgcggcgctggcaaaactgtactgtgcacgtaccgcaatggaagtcattgatgatgcgattcaaatcatgggcggtctgggctataccgatgaggcgcgcgtctcccgcttctggcgtgatgtccgttgtgaacgtatcggcggcggtacagacgaaattatgatttacgtagcaggtcggcagatcctgaaagactatcagaacaaataatctgcaggcggcgcagcttcttaacaaactgcgccgccagatttatccaacaagacttaccggttgaggaaattcagataggatttcttgttccgcaaaacagtttttaaattgtctacggtaatcgctggggctacaaccgacatggcgcaaaaacagtttggcaaagtgatcgacattttcataacccacacgccaggagatctctgcctgacttaattcagtattagtgagactccattttgcttccgtcatacgccgttgaataacatagttaataggggaaatacgatactctttggtaaattcatggcaaatataactgacgctggcacgaaattttttgcttaactgttctaaagtgattttttcgcgataattattattcagatagaaaagaatatcttttatcagaacatcttttttaatatacccctgctcgctacgataagcatttttaaaattttcgtagtaaagaatggctaacgtataggcaaatgcatcccataagctagatgtttggctatttttactttgcggcaaaatcacacttagctcattaaataaggtttttatgacttcttttccctgccccgcggcaattaccggacaagaatgcggttgcagtagctgattttcctcagccccctgaaactgaaagccgtacagcgcacaggtacacgtcgttgccggatcgttaacgtcagaggccaccgcatgcagcctgccgcgttctatcaccacaatgtcatccgcatgtgcgacatataagctagaatcgatggtaaaccttgcaacccctttcttgacgtaaatcaactcggtttcattgtcatgaacgtgatgtccggactcccattttggatcatcgctaaatgcaaaacgactaagccgtggcgttttaccggcgacaaacagcgtttcactggcgttatcaaaacagcgttgatacatgacaacctccctattccatgagcaagcaaaaacaatatatgccggataaaatacggcgtgtattgcggttatacaaccgcgtttagcgagagctaaacaagattatttacactgaatgcaagattgtacggtcatggaataactatattgccgcaaattgcacttttgttttagcgatcgcattttttttgcaagattgttggcaaggaaaacagcttgctccgtcgaaaaccccgcaccgctatcgcacactattttcaggccatttttaccttccatcggagatggttccgtatgcgactcacaggagaaatcatgaaaataataacctgctttaagctggtgcctgaagaacaggacattgttgtcactccagaatacaccctgaatttcgacaatgccgacgccaaaatcagccagttcgatctcaatgccattgaagctgcaagccagctcgcaacagatgacgatgagatagccgcgctgaccgttggcggcagtttgttgcagaacagcaaagtgcgcaaagacgtgctatcccgcgggccgcacagcctgtatttggtgcaggatgcgcaacttgaacatgcactgcctctcgataccgcaaaagcgctggcggcagcaattgaaaagatcggcttcgatttactgatctttggtgaaggttccggcgacctttatgcccagcaggttggcttgctggtcggagaaattctgcaacttccggtgattaatgcagtgagtgctattcagcgtcagggcaatacactggtgattgaacgcacgcttgaagatgatgttgaagttattgaactctctgttccagccgtgctctgcgtcacctccgatattaacgtgccacgcattcctagcatgaaagccattctcggcgcgggtaaaaaaccggtaaatcagtggcaggcaagtgatattgactggagccagagcgcgccacttgctgaactggtcggcattcgcgtaccgccgcaaacagaacgtaagcacatcattatcgataacgatagcccggaggccattgccgagctggcggaacatctgaagaaagccctgaactgaagcctacggagaagaaacgatgagtcaattaaacagcgtctgggtctttagcgataatcctgaacgttatgctgaactgtttggcggcgctcagcaatggggccaacaggtgtatgccattgtacaaaataccgaccaggcgcaggcagttatgccttatggtccaaaatgtctttatgttcttgcgcaaaacgacgcgctgcaacgcactgaaaattacgccgaaagcattgctgccctgctgaaagataaacaccccgctatgttgctgttggccgcgacgaaacgtggtaaagcgctggcagcacggttaagtgtgcaactgaatgcggcgctggtgaacgatgccacggcggtggatattgtcgatggtcacatttgcgccgaacaccggatgtatggcgggttagcgttcgctcaggaaaagatcaacagcccgctggcgatcattacccttgcacccggtgttcaggaaccgtgcaccagtgatacctctcatcagtgcccgacagaaacggtaccttatgttgctccgcgtcatgaaattctctgtcgcgaacgccgtgcgaaagccgcaagcagcgtggacctgagcaaagcaaaacgtgtggttggcgtcggtcgtggactggcggcgcaggatgacctaaaaatggtccacgaactggcggcggtgctgaatgctgaagtcggctgtagtcgtccaattgccgaaggcgagaactggatggagcgtgaacgttatatcggtgtctccggcgtgttgctgaaatccgatctctacctgacgctggggatctccgggcagatccagcatatggttggcggcaacggcgcaaaagtgattgtcgccatcaataaagataaaaatgcgccaatcttcaactatgccgactacggtctggtgggcgatatctacaaagtcgtccctgccctgattagccagttgagccgctaattcccctttcaaccacatctcccgctgtaaacgcagcgggaagggagcataacgcatgagcgatgacaaatttgatgccattgtggtcggtgcgggcgttgctggtagcgttgccgcactggtcatggcacgagccgggctggatgtcctggtgatagaacgcggcgacagtgccggatgtaaaaacatgaccggcgggcgtctttatgcccacacacttgaagcaatcattccaggctttgcagtaagtgcgccggtagaacgcaaggtcacacgcgagaaaatctccttcttaaccgaagaaagcgccgttaccctcgattttcaccgcgagcagccagatgttccgcaacacgcatcttataccgtattgcgtaatcgtctggacccgtggttgatggaacaagccgagcaggcgggcgcgcagtttatcccaggcgttcgcgtcgacgcgctggttcgtgaaggaaacaaggtcactggcgtgcaggctggggatgatattctcgaagcgaatgtggtgattctggctgatggcgttaacagcatgcttggccgcagcctgggaatggttcccgcttccgatccgcatcattacgctgttggtgttaaagaggttattggcctcacaccagaacagatcaacgatcgctttaatattacgggcgaggaaggtgccgcctggctgtttgccggttccccttctgacggcctgatgggcgggggatttctctataccaacaaggattccatatccttggggctggtttgtggattgggtgatatcgcccatgcgcaaaaaagcgtgccgcaaatgctggaagattttaaacaacaccccgccattcgcccgctgattagcggcggcaaactgcttgaatattccgcgcatatggtgccggaaggcggtctggcaatggtgccgcaactggttaacgagggcgtgatgatcgttggtgacgccgcaggcttctgcctgaatttgggttttacggtccgcggcatggatttagccattgcaagcgctcaggctgccgccacaacggtgatcgccgccaaagaacgcgcggatttctccgccagcagtctggcgcaatacaaacgtgagctggaacaaagctgcgtcatgcgtgatatgcagcattttcgcaagatcccggcgctgatggaaaacccgcgcctgtttagccaatacccacgaatggtagccgacatcatgaacgagatgttcaccatcgacggcaaaccaaaccagccggtacgaaaaatgatcatgggacatgcgaagaaaattgggctgatcaacttgctgaaagatggcattaagggagcaaccgcgctatgagccagaacgctacggttaacgtcgacatcaaattaggcgtcaataaattccatgttgatgagggccacccgcatatcattctggcggaaaatcccgatatcaatgaattccataaattaatgaaagcctgccctgccggactttataagcaggatgacgcaggaaacattcattttgattccgccggttgtctggagtgcggcacctgtcgggtgctgtgcggtaacactattctcgaacagtggcaatatcccgcaggcaccttcggtattgattttcgctacggctaatcatgcatcccacaggcccgcatctcgggcctgatgttctgtttcgagagtccaacatgaaagtgacattaacgtttaacgaacaacgtcgtgcggcgtatcgtcagcaagggttatggggcgatgctagcctggccgattactggcagcagaccgctcgtgcgatgccagacaaaattgccgtggtcgataatcatggtgcaagctacacctatagcgcgctcgatcacgccgcgagctgtctggcaaactggatgttagcgaagggtattgaaagtggcgatcgcatcgcatttcaactgcctggctggtgtgaatttaccgttatctatcttgcctgcctgaaaatcggtgcagtttccgtgccgctgttgccttcctggcgggaagcagaactggtgtgggtgctcaataagtgtcaggcaaaaatgttctttgcaccgacgttgtttaaacaaacgcgtccggtagatttaatcctgccgctgcaaaatcagcttccacaactacaacaaattgtcggcgtggacaaactggctcccgccacctcttccctcagtttaagtcagattatcgccgacaataccagtctgaccacggcgataacgacccacggcgatgaattagctgcggtgctgtttacctccggaaccgagggtctgccaaagggcgtgatgctaacgcataacaatattctcgccagtgagcgggcttattgcgcgcgactgaatctgacctggcaggatgtctttatgatgcctgcgccacttggtcacgcaacgggctttctgcatggcgtaacggcaccattcttaattggcgctcgcagcgtgttgttagatattttcactcctgatgcgtgtctcgcgctgcttgagcagcagcgttgcacctgtatgctcggcgcaacgccgtttgtctatgatcttttgaatgtactagagaaacaacccgcggaccttagtgcgctgcgtttctttctttgcggcggaaccacaatccccaaaaaagtggcgcgtgaatgccagcagcgcggcattaaattattaagtgtttatggttccacagaaagtagcccgcatgcggtggtgaatctcgatgatcctttgagccgctttatgcacaccgatggttacgctgccgcaggtgtagagattaaagtggtcgatgacgcacgcaagaccttaccgccaggttgcgaaggtgaagaagccagccgtggccccaatgtgtttatggggtattttgatgaacctgaattaaccgcccgtgccctggatgaagaaggctggtattacagcggcgatctctgccgtatggatgaggctggctatataaaaattaccggacgcaaaaaagatattattgtccgcggcggcgaaaatattagcagccgtgaagtggaagatattttattgcagcatcctaaaattcacgatgcctgtgtggttgcaatgtccgatgaacgtttaggtgaacgaagttgcgcttatgtcgtgctgaaagcgccgcatcatagtttaagcctggaagaggtagtggctttttttagccgtaaacgggtcgcaaaatataaatatcctgaacatatcgtggtaatcgaaaaactaccgcgaactaccagtggtaaaatacaaaagtttttgttaagaaaagatattatgcggcgtttaacgcaggatgtctgtgaagagattgaataagtttcatcttcggggatcacataaccccggcgactaaacgccgccggggatttattttatttcttcagttcagccaggcttaaccaggtttgcaccacggtgtccgggttcagagacaggctatcgatcccctcttccatcaaccatgcggcaaagtcttcgtggtcggacggaccctgaccgcaaatcccgacatatttgccctgtttcttcgcggcacggatagccatgctcagcagtgctttcaccgcatcgttgcgctcatcgaacaattcagacaccacgccggagtcacggtccagaccgagcgccagctgcgtcatatcgttactgccaatactgaagccgtcgaaatattcgaggaactgctcggccagcaaggcgttggacgggatttcacacatcatgatgattttcagcccgttctcgccacgtttcagcccctgacgcgccagttcttcaaccaccgctttcgcctgatctacggtacgcacgaacgggatcatgatctcaacgttggtcagtcccatgtcgttgcgcacacgtttcactgcttcacactccagcgcgaaacagtcgcggaagctgtcggaaacatagcggcccgcgccacggaagccgagcatcgggttctcttcatctggctcgtaacgctcaccaccgaccaggttggcatattcgttgcttttaaaatcagagagacggacaatgacgcgcttcggataaaacgcggcacccagcgtcgcgatcccttcagtcagacgaccaacgtaaaattcacgcggagaatcaaaacctttcatcatctcgcggatttcgttttgcaactgcggttcctgatcgtcaaactcaagcagtgcgcgtgggtggacgccaatcatacggttgatgataaattccagacgcgcaaggcccacgccttcgttcggtaggcaggcgaagtcgaaagcacggtccgggttaccgacgttcatcatcactttcaacggcagatccggcatcgtttctacgctggagcttttcacgctaaattccagcaactccgcatagacgtaaccggtatcaccttcggcacaagaaacagtgacgttctcaccgtctttcatccgttctgttgcatctccacagcccactaccgccggaatgcccagttcacgagcgatgatcgccgcgtgacaggtacgaccgccacggttggtgacgatggcagatgctttcttcatgatcggttcccagtccgggtcggtcatgtcagtaaccagcacgtcgccaggttcgatgcggttcatttcgctgatgtcatggatgactttcaccggacccgcaccgatgcgatgaccgatagcacggccttcggcgataatcttaccctgactatgcagcgtataacgctccatgacctgaccgcgactgcgcacggtttccggacgcgcctgcacaatgaacagtttaccggtgtggccatctttcgcccactcaatatccatcgggcgaccgtagtgtttctcaatttgtacggcctgttttgccagttcctgcacttcttcgttggtcaggctgaagatgtcacgctgttcctgcggtacgtcttcgattttaacctgcttgccgtgctcctgggtcggcgcgtaaaccatgcggatttttttgctccccatggtgcggcgcacgatagccgggcgattcgccgccagtgtcggtttatgcacgtaaaactcatccgggttaaccgcaccctgcacgaccatctcaccaaggccccatgcggaagtgataaacaccacctggtcaaagccggattcggtatcaatggagaacatcacgccagaacttgcgaggtcagagcgcaccatccgttgaacaccggcggagagcgccacaccacggtgatcgtaaccctggtgcacacgataagagatggcgcgatcgttaaacagagaagcaaatacatgtttcactgccacgagaacggcgtcaaaaccctgaacgttgaggaaggtttcctgctgaccggcaaaagaagcgtccggcatatcttctgcggtggcggaggagcgcaccgcaaaagaggcgttttcgtcatcggcggaaagctgtgcataggcttcgcggatggcgttttccagctcaggctggaagggagtgtcgataatccactggcggatttgcgcgcccgctttcgcaagctgagtaacatcgtcaatatccgttttatccagcagttcataaatgcgctggtttacgccgctttggtccagaaactggttaaacgcgtcggcggttgtggcgaaaccattcggaacggaaacacccattccggaaagattagtaatcatttcacccagggaggcatttttgcccccaaccctgtctacatcattcatgccgagttggttataccaaagcaccagcggactgctgccattgttggacatcgaacaatccttttgtgataaatgaacggtttgagaaacacatttctgcgcatttatctttgcatatttaaccggatgaaaaaaacggtgaatcgttcaagcaaatatatttttttactttttaagactgatcccagcgttgcgcaaatctgctctcttcgacaatttccacataaaccatcggtataaacgaaaccataaaaatgaaatgctgttttcataaaaaataaaattgaaggttcattttataaaccagacataacgttctacgcttctgtgcgtttttaatttatgctttcatagaattatgtctgcatcacgggaagaacaaaatggataatgctgttgatcgccacgttttttatatttctgatggtacggcaataactgcggaggtattaggacacgcagtaatgagtcaatttcccgtcactatcagcagcatcacgctgccgtttgtcgaaaatgagagccgtgcacgggcagtgaaggatcagattgacgcaatttatcaccagacaggcgtgcgcccgctggtcttctactccatcgtgttgccggagattcgcgccatcatcttgcaaagtgaaggcttttgccaggatatcgttcaggcgctggttgccccgctacaacaagagatgaaactggatccaacgccgattgctcatcgtacccatggccttaaccctaataatctcaataaatatgatgcgcgcattgcggcgattgattacaccctcgcccacgatgacggcattagcttgcgcaatctggaccaggctcaggtgatcctgctcggtgtttctcgctgtggtaaaacccccaccagtctgtatctggcaatgcagtttggtatccgcgcggcaaactacccctttattgccgacgatatggataatctggtgctacccgcgagcctcaaaccgcttcagcataaattgttcggcctgactatcgacccggaacgtctggcggcgattcgcgaggaacgtcgggagaacagtcgctatgccagccttcgtcagtgcaggatggaagtcgcggaagtggaagccttgtaccgtaaaaatcagatcccgtggattaacagtaccaattatagcgtagaagagattgccaccaagatcctcgatatcatgggccttagtcgccgaatgtactaaagaactagtgcattagcttatttttttgttatcatgctaaccacccggcgaggtgtgacacacctcgcacttgaaatcagcagcgattggtttatcgtgatgcgcatcacttcccggcagtcctgccgtagaagcaacaaatttctgagacttgtaatgaacagaactgacgaactccgtactgcgcgtattgagagcctggtaacgcccgccgaactcgcgctacggtatcccgtaacgcctggcgtcgccacccatgtcaccgactcccgccgcagaattgaaaaaatactgaatggtgaagataagcgactgttggtcattattggcccctgcagcatccacgatctcaccgctgcaatggagtacgccacccgtctgcagagcctgcgcaaccagtaccagagtcggctggaaatcgtaatgcgcacctattttgaaaaaccacgaactgttgtcggctggaaaggactaatctccgatccagatttaaacggcagctatcgggtaaatcacggtctggagctggcgcgcaaattacttttacaggtaaatgagctgggcgtcccaaccgcgaccgagttcctcgatatggtgaccggtcagtttattgctgatttaatcagttggggcgcgattggcgcacgtactaccgaaagtcagatccaccgcgaaatggctagcgcactctcctgtccggtaggttttaaaaatggtaccgatggcaatacgcggattgctgtggatgctatccgcgcagcccgcgccagccatatgttcctcagcccagacaaaaatggtcagatgaccatctatcagaccagcggcaacccgtatggccacattattatgcgtggcggcaaaaaaccgaattatcatgccgatgatatcgccgcagcctgcgatacgctgcacgagtttgatttacctgaacatctggtggtggatttcagccacggtaactgccagaagcagcaccgtcgccagttagaagtttgtgaggatatttgtcagcaaatccgcaatggctctacggcgattgctggaattatggcggaaagtttcctgcgcgaaggaacgcaaaaaatcgtcggcagtcagccgctcacttacggtcaatccattaccgacccgtgtctgggctgggaggataccgaacgcctggtcgaaaaactcgcctctgcggtagatacccgcttctgaatgcgtgcccattcctgacggaatgggcatttctgcgcaacttgttgtcttctcaacaaattactgcttgctctggtcagccataatattgataataagaatcattgttatatcaattattattaatttttatgcgttatacggatagcagaaaactcacgcctgaaacggatgccaatcacaagaccgcttccccgcagcctattcggcgaatttccagccagacactgttaggtccggatggcaaactgattatcgatcatgacgggcaagaatatctgctccgtaaaactcaggctggcaagctgctgttgaccaagtaacctttaactgctgcagctgacttccagccgtttaccccagtcaggtggacgactgacatagtcatcatctctgtcgctgaaaggatttcgcaacgcctcatgcaggcggtgcaattccgtcatatcacccttttctgccgcttcaatcgcccgttgcgccaaccagttgcgcaataccagagcggggttaacgctttgcatcagttgctgacgctcactatcgctaacctcgtcttgttgcaaacgcccccgataacgggcaaaccagtcatcaaatgccgcacgatcaataaactcatcacgtagcggactcgccgcgctgtgctgctcggtcagactcagcatgcggaatgtgcgggtataatcgctgcgctctcgcgccatcagactgaataattcattcagtagcgcgttatcctctttttgctccgtcatgaagcccagtttctgccgcatccgttctccataatgcgtcaacaaaacctgctgatagctgtccagggcctcattcagggcatctacggcaacaaatgggctcaatgtctgcgccagacgctgtaaattccacaacgcgacggcaggttgattatcaaagctgtaacgcccttgatgatcgctgtgattacaaataaaaccgggttcgtaatcatcaagaaaaccaaacggcccgtaatcaagcgtcagccccagcaggctcatgttgtcggtattcatcaccccatgagcaaagccgaccgtctgccattgggcaattaagctcgcggtacgtgcgacaacatcgctaaaccagagacggtatttgtcctcatcatctgcaagatgactccagtaatgacgaatagcaaagtcagctaactgacgaaccttttcgctctcgcggcggtagtaaaaatgttcgaaatgaccaaagcgcagatgacttggtgccacacgcatcagcatcgcgcctggctccgccgtttcccgatacactgggctatcgctggtgacgatacttaacgcgcgggtcgtcggaatgcccagataatgcatcgcctcactggcgagactttctcgtatcgtgctacgtaaaaccgcccgtccatcacccattcggctataaggcgtcaggccagcacctttcagatgccagtccattgtagtgccatcagcaagcagttgttcgccgagtaaaatgccgcgcccatcacccagttggcccgcccagacgccgaactgatgaccactgtaaacctgcgccagtggactcataccaggcagtagggcttcgccgccccagacacctgcgccatttttaaacaggctgcttggaatactcagcgtgttagccagttcggtattatgccaaatcagccgggcattatttaaaggcgtaggggaaagtgctgtataggtttctggcaattcatcgcgccagcgggtaacaaaagacagggtcatagatcctcctgtttgatagtgtagacggttactctcgtcttaaacaccagcaaacagaagggttatcgctgaaccaacgtcgttatctgatttatgggaacggcaggccacaggcatccctggagagcatggaaatcgaagggggtaatctgtgccaatatttctgccgtatcaatgcctcccgcaatgatgcaattgcaacaaggggaaatttgcgcctggatcgcacgaataaacggttcgaaggagcggtgcgtgatttgttgctgaataaaacttttatccagcatgacgcgggtgaaaagaccatcaaaaaccgctttcattgtgctattgcctgctcccaaattacctaacacaaggggatacacttggcttaaggataaaagaccgcgattatcttttccttcattgagatgcgggtaattctcattaatcaacagttcaataaacggatattttaatagttcgcctgcgtaattatccctctctaataataatgtagccacttgtggcgttaaattaagccaggcaaagagtttatgttgaataaaaaaatgttggcaactttttagtaattccaactgctcactaaataattgccaatgttgctcctcggtaagttgcgctataacccgactcgtcgggatacgaaccgtaccatcttcactggagaaatgggtaattaactcaacgccgacaaggacttgctggttgtctcttatcggcaggaaatagcaatcagaatgataaagattctccaaaaaaatcttcatggtaaccgtccctctcgaaggatgtttttcagtatccggctaaaagggatgaggccataagacataacaattacagaaggagtaactttcatttgttccatgttaaccactttttcaggggtcctttttttagattatcctgattataaacgaataatccatttacggaatttttgtctgcaaaatactactgtattcaggagtaaatggacggcgatgtatcatcgccgtccatttttcgacatattagattcgtctcgcctgccagaaatttttctgccaatagacattatcaagactggaacgcatcactcccttgctggtagaggcgtggataaattggttgttggtatcgtaaatacctacatgcaaaccattttgtccggaccccgttttgaaaaagaccaggtcacctggcagcaactcgtctttatcaatttgcgtgccaatagaggcttgttgtttggtttcacggggcagctgcaaatcgaaacgatcgcgcatcgtcacaaccacaaatccgctacagtccacaccgcgccgcgtcatgccaccataacgatacggcgtgccatgccagctttgtagctggtcgttcaaaccggcaataacggtaatgctatcagaaagtctggcatttggcggcggtgctttatggtggctacacccggccagaagcagtgctgtgatcaaaataaggcagaaacgcattccgtacggttcctctgttttttattcttgcattaatttagcgtcgtaattacccgattttcaagatactaatgaaatcagatggtgctaatcagcattctgtgaccttcgatatccagacggcgaaaattcatcccataggcctgcgccagatttggcggcgtgagcacctcttccctgcgtccactggccagcatttttccaccttttagcaaccacgcccgatgcgcatgacgcaatgtgtggttgagatcgtgactgctcatcacaatcgccagtccttgctgacacagcgcgctcagaattttgtctaacgcactttgttgcgcaacatcaagactgttcatcggctcatcaagaagcagcaattggcctgcgggattggcttgtggtgtgatttgcaacaccaccgcagcaagacgtacgcgttgccattcaccgccggaaagttgattggtgctacgtccgagtttgtcatcaagagccagcgcccctgcgacatcattcagtagttcggtacgcgttttatcgtgctgatgcagtgtcaggtagtgccagaccggcgttgcaaacggcggcgtctgctgttgactaagataggcgcgatgcagcgcgagttttgttgcggaccatgcttccagtggttgccccgcgaactgaatgcttcccttaccgctggtcattccggccattcgcgccagtaaggtactcttacccgcgccattcggccccaccaggtgcaggatctccccagcccgaacctcgccagaaagcggccccaggcgggtagattccgcaacatcttgtaactgcatcacaatagacattattttgccaacgccagtttaatgctttccatcacaatgggatcttccggcgtcatatccggggaaaaacgctggatgacttttccgtccctgccaaccaggaatttttcaaaattccataaaatatcatccgggtacagcggtgcacggcctttgctgaccatacgggcatagaatccgctctcttccggcgcgactgcggtcggcgctgcggcaatcaatttttgatacagcggatggcgtccttcgccattaacttcaatcttactgaacatcgggaacgtcaccccccatgtggtggtacagtaagttttaatctcttcatcgctgcccggttcttgttccagaaactggttgcacgggaatcccagcaccataaaacctcgatcgacccaggctttctgaatattctccaactgctcatattgcggcgttaagccacacttactggcgacattgacaatcaacagcacattaccggcgaacttctccagcgtggtcacttcaccgtcgatatctttcactacggtcgtcagaatggaatcttgcatcgtttctcctgggtgtggtcagtaaaaatcttagcttttaatcatagaccgtctttttgcggttaacgtcctgcttttaacaataaccagataaacaccggcgcacctaacgttgcggtgaccacgccaataggcagctctgcggcagctaatgccaggcgcgctacaatatcggccagcagcaatgcgctcgcccctgccagcgcgcagccgggaagtaatacgcgatgatcggttaaaccacacaaccggagaatatgggggatcaccagaccaataaagccgatagcacccgccagcgccacactgacgccaaccatccagccggtcgctgccaccagcacattgcgccagaaccacaggggtaaacccagttgccgcgcgctgatctcgccaagtgctaacatattcatcggcctggactgacaacagatccacaacaacacggggatcaatgccagcatcagccagctttgccgccagtctacgccgccaaaaccgcccatcatccagtacatcagctgacgcaaatcaacactggtggaaaagtagatagcccacgtcattagtgcgctacagataatccctaatgcaacgccagccagcaataaccgactggtgctaagatgacgacgggcgaaacgtaagagtattaaagtgatgataagcgcgccagcaatcgcacacagccctagcgcccagttggggagttgcccttgcccaagcaataccgcggcgataagccccacgcctgcgccgttagagacgccaagtagtccaggttctgccagaggattttcaaacaacgcctgcattacagcgccggatatagccagcgccgcaccaaccagcaatacagccagcgtacgtggcaggcgaatttgccagacgaacagttcgccacgaggagtaaaccagtcacctgggctgatccattgttcaccggcgcaaaggcttaagagaagcgccagcagcatcaaaacactcaggcataataaccagcgaatattttgtcgctgttgttggcgggcaagtgtcagcatggtatccgttctgctgaagtgtcatggcgttgattttacggtgactcttcgacagtgaaaagaaaaaaggccgcagagcggcctttttagttagatcagattactcgtctttggggctagcgttttcgacccggctttttaacttctgcccgggtctgaaggtcaccacgcgccgtgctgtaatgggaatatcctcgcccgttttcgggttacgtcccgggcgttgattcttatcacgcagatcgaagttaccaaaaccagagagtttcacctgttcgccgttttccagagcgcgacggatctcttcgaaaaacagttcaaccagttctttggcatcccgcttgctaagcccaagcttatcaaacagatattcactcatttcagcttttgtaagcgccataggttcaatccctcaaacttgcctggaatcgctcttttaatgcctctacacatttggcgacggtagcggcaatctcctcttcttcgagtgtacggctggtatcttgcaggatcaggcttatggcgaggctcttatacccctccgcaacacccttaccgcggtacacgtcaaataagtttacgccaactacctgatttacgccaactttcttacattcggataaaatatccgctgcgggaacgttttctgcgaccaccaccgcgatgtcacgacggttcgccgggaagcgagaaatctcgcgcgcctgaggcaccacgcggtctgcgagcttgttccactccagttcgaacaccagagtgcgaccgttaagatccagtttacgttccagttcaggatgaacaaccccaacaaaaccaatacgttcacctttcagataaatcgctgcggattgccccggatgcagtgccggattcgcttctgcacggaactcaacctcattcagtttaccggtcaggtcgagaacggattcaagatcgcctttcaaatcatagaaatcaacggtctcttttgccaggttccagtgctcttcgtaacggttaccgcaaatcacaccggctaacatcagatcctgacgaatgcccaacggtgcctgagtatctggtacgaaacgcagaccgctttcgaaaatgcgcacacggttctgctgacggttctggttgtacaccacggttgccagcaggccagtccacagagaaagacgcattgcactcatttcaacagagatcgggcttggcagcagtaaggcttcaacgcctggatggatcatctgctgcactttcggatcaacgaagctgtaggtgatcacttcctgatagcctttgtcgttgagcagcgttttcacgcgcttgaggctcaggtcagcttcacggtgagtacccataatcaggcttgcctgtaccggctcatccgggatgttgttgtagccgtaaacacgcgcgacttcttcaaccagatcttcttcaatctccatatcgaaacgccagctcggcgcaactgcctgccattcgtctttgccttcggtcacttcgcagccgagacgacgcagaatgtcagttacctgctcatccgcaatatgatggccgatcaggcgatccagtttgctacgacgtagagtgatggttgcacgcttcggcagcgttgcttcgttggtgatatcaattaccgggccagcctcaccaccgcagatgtcgatcagcagacgggtcgcacgttccatcgctttgtgctgcagtgccggatcaacgccacgctcataacggtgagacgcatcggtatgcaggccatgacgacgagcacgaccggtgatagacagcgggctaaagaacgcgcattccagcagcacgttttgtgtttcgtcattcacgccagagtgttcgccaccgaagatgccgcccatcgccagcgccttgttgtggtcggcgatgaccagagtgtcagcattcagcttcgcttcagtaccgtcgagcagcaccagcgtttcgccctctttcgccatccgcaccacaatgccgccttcaatgcgatctttatcgaaagcgtgcatcggctggcccagttcgagcagcacatagttggtgacgtcaacaactgcatcgatagaacggatcccgcaacgacgcagtttttctttcatccacagcggagttggcgctttaacgttaatgccttttaccacacggccaagataacgcgggcaggcttccggcgcttcgactgtaatcggcagcgtgtcgtcgatggtcgcaccaaccggaacgatttccggttgaaccagcggcagctggttcagcacggcaacgtcacgcgcaacaccaatgatgcctaagcagtcggcacggtttggcgtcacgctgatttcgatggtgttgtcatcaagtttcaggtattcacggatatcggtgccaatcggcgcatccgcaggcagttcgataatgccgctgtgatcgtcagaaatgcccagttcagagaaggagcacagcatcccttcagacggttcgccacgcagtttcgccgctttaattttgaaatcacccggcagaacagcaccaatggtcgctaccgctacacgcaggccctgacggcagtttggcgcaccgcagacgatgtccagcaggcgatcgccgccgacattcacttttgtcacacgcagtttgtcagcgttcggatgctgcgcacactcaaccacttcaccaacgaccacgccgtggaagctgccggcaaccggttctacaccgtcaacttccaggcccgccatagtgatttgatttgccagcgcatcgctatcaatcgccgggttcacccattcgcgtaaccacagttcactgaatttcataatctattcctgccttatttaaactgtttgaggaaacgcagatcgttttcgaagaaactacgcaggtcggtgacgccgtaacgcaacatagtcagacgctccatccccatcccgaaggcgaaaccagagtaaacttccgggtcgatgccaacgttacgcaacacgttcggatgcaccatcccgcagcccagcacttccagccatttaccgtttttacccatgacgtccacttctgcagaaggttcggtaaacgggaagtaggaaggacggaagcgaatctgcaaatcttcctcaaagaagttacgcaggaagtcgtgcagcgtgcctttcaggttggtaaagctgatgttggtatcaacaatcagaccttccatctgatggaacatcggcgtgtgagtctggtcgtagtcgttacgataaacacggccaggcgcgatgatacgaatcggtggctgctgggctttcatggtgcggatctgtacgccagaggtctgggtacgcagcaggcgggtagtgtcaaaccagaaagtgtcgtggtcagcgcgcgccgggtggtgaccaggaatgttcagagcatcgaagttatgataatcgtcttcgatttccggcccggttgccacggtaaagccaagctcaccgaagaaactttcgatacggtcgatggtacgggtaaccggatgcagaccgccgttttcaatgcgacgacctggcagagagacatcaatcgtttccgccgccagacgcgcattcagtgcagcgctttccagttccgctttacgcgcattcagcgcctgctgaacctgctctttcgcttcgttgataaccgcaccagctgccggacgctcttctggcggcagctcacgcagggtcgtcatctgaagggttaagtgcccttttttacccaaatattcgacgcgcacattatctaacgcggcaacatcactcgcctggctaatggccgccttcgcactggcaaccagttctgcgagatgactcatggttttcctcattgtgtcagtggtgacactggttcgttggacttagagcctatcccatcaggctattttacttgccattttggtcccgggctgtgctcgaaattctcacgtacttaaatacgctccggtttctccgcgctggccgtgtccagtctggctgcgacaattacacctgatgagacaggctttttatttttcaaaacgcgcatacaaaaaaagcctccactgggaggctttcaggcgctgttttccgtttctcttctcacgcgctagcctcctggattcaggtgctaaagtaaaaaaagaagcggaaaatagcagcattcattgcttgcgttaccttttggtactcttcaaaagacctttattgaaaaggctacggcgataaaagtcaatgttttgatggcgttgaaacgaaaagagggagactagctccctctttcaactggcttatgccagagctgctttcgctttttcaaccagagcggtgaacgctactttgtcgaatactgcgatatcagccaggatcttacggtcgatttcaacagaggcttttttcaggccattgatgaatttgctgtaagaaataccgttctgacgtgctgctgcgttgatacgcgcaatccacagttgacggaactgacgcttacgttgacgacggtcacggtaagcatactgaccagctttgataacagcctggaaggcaacgcggtatacgcgagaacgcgcaccgtagtagcctttagcttgtttcaaaattttcttgtgacgtgcacgtgcaataacaccacgttttacgcgagccatatgtgctctcctgtatctatattctaattaaaaagttaaaaacgttaacggcttatgcgtacggcaggcacgcgattaccaggcccagatcgcctttggaaaccatggctttcggacgcaggtgacgtttacgtttggtcgcttttttggtcagaatgtgacgcaggttagcgtgcttgtgcttaaaaccacctttaccggtttttttgaagcgcttagcagcaccgcgtacggtcttaatttttggcattttaataacttccacttcgcattgttaataaacgaaacaaaggcgaacaaagcctgtgaagcccgaaggctccacagacagtgctacttgaaggccttactgtttcttcttaggagcgagcaccatgatcatctggcggccttcgatcttcgttgggaaggattcgaccactgccagttcttgcaaatcgtctttcacgcgattaagcacttccataccgatttgctggtgcgccatctcacgaccgcggaaacgcagcgtgattttggctttatcaccctcttcgagaaagcgaatcaggctgcggagttttacctgatagtcgccttcatctgtaccaggacggaatttaatttccttaacctggataactttttgctttttcttctgttccttagaagacttgctcttttcatagaggaatttgccgtaatccattatacgacaaaccggcggctcggcgttagggctgatctcgactaagtctactccggcttcttctgctttctccagagcttctctcagactcacaataccaagctgctcgccttccagacctgttaagcgaacttcctgggcgcgaatttcgccattgatacggttagggcgcgccgtttgaactcgttttccgcctttaataccttattcctccaattgtttaagactgcggctgcgaatctcttgttgcagcttctcgatcacttcatttacgtccatgcttcccaggtctttaccacggcgggtgcgaacggtaactttgccactttccacctctttatcaccacagaccagcatatatgggacgcgacgcaaagtgtgctcgcggattttaaagccaatcttctcatttctcaagtctgctttaacacgaatgcccgcattacttagtttttgcgtcaattcgttaacgtattcagactgactatcggtaatattcatgataacaacctgaaccggcgcaagccaggtcgggaagaaaccagcgaactcttcggtcaggataccgatgaaacgttccatgctccccagaattgcgcggtgaatcattaccggtactttacgttcattgtcttcgcctacataagaagcgctcagacgagacggcaaagagaagtccagctgtactgtaccgcactgccatgcacgatcgaggcagtcatacagggtaaattcaattttcggaccgtagaaagcgccttcacccagttgatattcaaacgggatgttgttttcttccagcgcaaccgccaggtccgcctcagcacgatcccacatttcgtcgctgccaatacgtttttcaggacgagtggagagtttgacgacgatcttctcgaagccaaaagtgctgtacatatcatagactaaacggatacatccgttaacttcatcgcgaatttgttcttcagtacagaagatatgcgcgtcatcctgggtaaatccacgcacgcgcatcaggccatgcaggctaccactcggctcgttacggtggcagctaccaaactcggccatacgcagcggcagatcgcgataagacttcagcccctggttgaaaatttgtacgtgacccgggcagttcatcggcttaatgcagtattcacggttctcagaagatgtggtgaacattgcatctttgtagttgtcccagtgaccggttttttcccacaggacacggtccatcatgaacggacctttaacttcctgatactggtactctttcagtttagaacgaacaaacacttccagttcacggaagatggtccagccgtcgttgtgccagaataccatacccggcgcttcttcctgcatatggtacaggtcgagctgtttaccgattttacggtggtcgcgtttcgcggcttcttccaggcgctgcaggtaagcgttaagtgcttttttgtctgcccacgccgtaccgtaaatacgttgcaacattttgttgttgctgtcgccacgccagtaagcccctgccgttttcattagtttgaaatgatggcagaaacgcatgttcggtacgtgcggaccgcggcacatatcgacatattcttcatggaagtacagacctggcttgtcatcatgggcgatgttttcgtcaagaatggagactttgtagctctccccacggttggcgaaagtttcacgcgcttcgtgccagctgactttcttcttaatgacgtcgtagtttttctcagcaagctcatgcatccgcttctcgagtgcttcgacatcttcctgggttaacgtgcggtcaagatcaacgtcgtaataaaaaccgttgtcaataaccgggccgattgccattttggtatgcggccaaagttgtttaatcgcgtgccctaacaggtgcgcacaggagtgacgaatgatctccagaccttcttcgtctttggcggtaatgatgctcagttgtgcgtcgttttcaatcagatcgcaagcatcaaccagttcgccattaacgcgccctgcgatacaggctttcgccagacctggaccaatgtccagcgcaacatccatggggcttacagcgtgatcgtaatggcgttggctgccatcaggaagagttataacaggcattttatatccttatttgcagtggtgacccacacgaaagatcacatacaaagaaaaatttgtttattaacagttcattgcgaaaccatctagccaacaaatgctaaattggttcgcaatcaggtacacaaatgaaagacattaacctctcaccttccacccggttgagcgatgttaacactaaaaaaagggagattgtacctttccgtttcacattgattcgattcgcaattcgtttgtagtgagtacaccagcaaaacgcttaaagaacaactgataacatcacggtgcgtctgaaaggtttactgcgagcggatttacagcagcataaactgaatccagcaaagttcgttgcgtgatttggcggtagtattttaaacgctcatgagattaatgacgaagtggtcatatcacaatgataaaagtgacacaattcttataacaatttttcgtgcacatttcgttctggcgataataattaatcatcatcctcaaaacctccagatatatataaggcgaacagattatgagtcaaaacgatatcattatcagaactcattataagtctcctcatagattgcacatcgatagcgacataccaacaccttcatcagagcctattaatcaatttgcgcgccagctcatcaccctacttgatacctctgacttaagttcgatgctgtcatactgtgttactcaggaatttaccgcaaactgtcgaaaaatatcacaaaattgttattccactgccctttttaccattaactttgccacttcacccatccatacagaaaatatactcattacattacactataaaaaagaaatcatttccttattactggaaaccacgcctattaaagctaaccatttgcgaagcatactggattatattgaacaggaacagttaactgctgaagatcgtaaccattgtatgaaactgtctaaaaaaatccatagagaaaaaaactatacacccaacagtaaatctcaatggtagtgcatgttttttgcaatctccttctgacgctattttttgtcgccatctgtcattgcaatacgcccttgattcattgagaaatggaaaaggcaaagtcaacctgattaaacattactcctccgttgaatccatacagcagcatgtccccttagtccgggacgcggagttcagagcattacttcgccatcctcctgcagggagtcgcgttatcgcgagtaaggattttggcttcgctttagatattttcttttgtcgaatgatggcaaacaatgtcagtcatatgtccgcgattttatatatagacaatcatactttgtcagtaaggctacgaataaagcagtcagtgtatggacaattaaattatgttgtgtccgtttacgacccgaacgataccaacgttgccgtcagagacacccacaggacagcacggggctttctttcgcttgataagttcatcagttcaggtcccgatgctcagacctgggctgatagatatgttcgcaactgtgcaattgctattctgcccctattacctgtgggagttccaggggctattttcgcgggtattgcatcacgaatgccatttgcccctatacatccatcggcaatgttgttaataatggctacaggccagtctcaacagcttattacattattcaaacagttgcccatactccctgaaaaagaaatcattgaaataataactgcgcagaatagcgttggtacacctgctttatttttggctatgatgaacggacatactgacaacgtgaaaatatttatgcaagaaattcagtcactggtagataatcacatcattcatgaagataatctggttaaattactgcaaactaaaagtgctaacgaaacacctggactttatatctccatgttgtatggattcgatgaaataatcgatatctttctgaatgcattaaccactccaatagcacaagagcttttaaacaaaaaactggtgatgagtattttagccatgaaaatacatgatggtgagccaggattatacgccgcaatggaaaataatcaccctttgtgtgtcacacggttcctctctaaaattaatggcatcgcctttaaatacaagttgagcaaagctaacatcatggatttattaaaaggagctacagcacagggaacccctgcattatacatcgccatgagcaagggtaatgaagacgtcgtgttatcttatatatcgacgctgggtgcttttgcaaaaaaacattcttttagtcaacatcagttatttacactattggccgctaaaaatcatgacaacatgtcagctgttcatatagccattcatcataagcattataaaactgtagaaacatattatgctgctattaatgcaatcagccaaagcctgagttttagtgctgatgaaataaagacgtatttataaccagctatttacgatatatatcgatacataattttatttttttcataaaacgcagaaacagtgaccatgtgcacaacgccacccgacggctgtaataacaaaaaatcccttgatgcctgtcccttttgttacactccgttatcacgcacaagagatatgcaggacactggtatgccgactaaacgctttgataaaaaacactggaagatggtggtggtgctactggcaatctgtggcgctatgttgttgctacgttgggcagcaatgatttggggctgagcagtgacaaacgaagacagccagaccgcataacacggtccggcagataattttacatgctgtagcccaggcttaaggttgtccgacggtcggtatgttccggtgcagactctggaggttcagagttccatgtgacgttgtaagccaccttcagtccaaaatgttcattaatagcaacatttaatgcgctttcggagttcagcgttgtgtcttccgcgccaaagacgctaacaccctgcgtaaatttagcgttgtcagtcaactgccatgcataagccccggaggcatagcccagcggctgggtttcactggcattgtcggtatatttgtcgtaacgcacacctggaccgaattcaaagcggaaactgtgtaccgggccattcaaaaactgacgaccataacccgcggtcaacacatcgcgctctcgatagccgttataacggtctgtcagccagcttgcctgaccaaataaatagtcataatcagttaaattaaaacggctacgcccgcccgccgcatatttttcactagaacgctcatcattagaagaagtattactggcgttcccccacaggctccaggcagtggtgtgtccataccaggtcatggtggtgtcagccgtaagactggagcttttcgtattgccactttgtgcaagatatcctgcgttcagattaccttcgaaaggttttttagcgctggcaggatcatccatgacagtaaaaacggaatcatcggcagctgcattcagactcgcaaacatgccccccgccaacataacgatggcaggaactgtcttcaaaagcttcatttatcaagagtccgtacaacaaaaaaagagaccatcgcggtcccggaaactttcttaaggatcaaagattagcgtccctggaaaggtaacgaattataaaaaggcgcgaataacttagcaatgtattcttatttcattttttgaataagcatgtggcgaaaacagatttttatttatatatatttatctgcaaaattttaaataaagctccaataaatcatattgttaatttcttcactttccgctgattcggtgccagactgaaatcagcctataggaggaaatgatggtacgtatctatacgttgacacttgcgccctctctcgatagcgcaacaattaccccgcaaatttatcccgaaggaaaactgcgctgtaccgcaccggtgttcgaacccgggggcggcggcatcaacgtcgcccgcgccattgcccatcttggaggcagtgccacagcgatcttcccggcgggtggcgcgaccggcgaacacctggttagtctgttggcggatgaaaatgtccccgtcgctactgtagaagccaaagactggacccggcagaatttacacgtacatgtggaagcaagcggtgagcagtatcgttttgttatgccaggcgcggcattaaatgaagatgagtttcgccagcttgaagagcaagttctggaaattgaatccggggccatcctggtcataagcggaagcctgccgccaggtgtgaagctggaaaaattaacccaactgatttccgctgcgcaaaaacaagggatccgctgcatcgtcgacagttctggcgaagcgttaagtgcagcactggcaattggtaacatcgagttggttaagcctaaccaaaaagaactcagtgcgctggtgaatcgcgaactcacccagccggacgatgtccgcaaagccgcgcaggaaatcgttaatagcggcaaggccaaacgggttgtcgtttccctgggtccacaaggagcgctgggtgttgatagtgaaaactgtattcaggtggtgccaccaccggtgaaaagccagagtaccgttggcgctggtgacagcatggtcggcgcgatgacactgaaactggcagaaaatgcctctcttgaagagatggttcgttttggcgtagctgcggggagtgcagccacactcaatcagggaacacgtctgtgctcccatgacgatacgcaaaaaatttacgcttacctttcccgctaacaaaaacattcccccagcattgggggaatcatcaccaacctgtcggcaacgcgtttctccgactatgctcaaaagtcatgtgataacaaaggggtgaactatggccagtggcgatcttgtccgttatgtcataaccgtcatgttgcatgaggatacattgactgaaattaacgagttgaataattacctgactcgcgacggttttttgctcactatgacggatgatgagggaaatatccatgagctgggaactaacacttttggacttatcagtacccaaagtgaagaagaaattagagaactggttagcgggcttacccaaagtgcaaccggcaaagatcctgaaatcaccatcacgacctgggaggaatggaatagcaacagaaaataaatggtttttgggcaataatcagtctgtggtgtgcgttagctcgtgtttttacaccgcattcttgcgctaaccttatgatctggcagacaacatgggagagacatcatgtggcaggcaatcagtcgtcttttgagcgagcagttaggtgaaggcgaaatcgaactgcgtaatgaactgcctggcggagaagtccatgccgcatggcatttgcgctatgcaggacatgattttttcgtcaaatgtgatgaaagggaactgcttcccggttttaccgccgaagccgaccaactggagttactgagccgtagtaaaaccgtcaccgtgcctaaggtttgggcagttggcgctgaccgtgactacagttttctggtgatggattatctcccacctcgtccgctggatgcgcatagcgcatttattcttggtcagcaaattgcgcgtttacatcaatggagcgaccaaccacaatttggccttgatttcgataacgcgctctccacaactccacagcccaacacctggcaacgtcgctggagtacgttttttgctgaacaacggattggctggcagttggaactggctgcagaaaaagggatcgctttcggcaatatcgacgccatcgtcgagcatattcagcagcgtctggccagtcatcaaccgcagccttctctgttgcacggcgatttatggtccggcaactgtgcactgggtccggatggcccgtacattttcgacccggcctgctactggggtgaccgagagtgcgacctggcgatgttaccgctgcatactgaacagccgccacaaatctatgacggctatcagagtgtatccccgctacctgccgatttccttgaacgtcaaccggtttaccaactctacacgctgttaaatcgtgcaaggttatttggcggtcagcatttggttattgctcagcagagtttggatagattattagcagcatgatatgggttgaggataatggccgctccgtgcggccttttgattaaataaacccaagcagagaaaagaacacataacctgcagcaatacaaataaccggcaggatatacagactgaaaaactgcaggaaaatagtatggtgcggaacaacaatacgggactcaatttgttcacgcgttagcccctcttcccctttggctttttccagaatgagttgatcttcaacaccttcccgcaagaagcgcgcctggcgactcatccgggcaccggaatcctgcaacgccagtccgacaaaaatcaggatgaaaatcacccagaacataacgttcacgccaccattaaaattgggcgtcggggagttataccagaatagattcaaaaaaggcgtattcgcctgcatcatatcgatcatgacatgagtaaagtcgagcatgaccgcattaatgccttccttgttttcctgccgggtattcataaatttcagcaaagaaatcaatgtagagatcaatgcaggtataaaaatcacccaacccaaaatccttttcaaaacagcaatgcgtccagcttgttgatacgtcatgagttctccttgattaagacgcgtcgtttcacttagtttacctgtagatatctgttttcgcccattctttaaaggcgatatgataggcgcttaatcataagcacggcttaataccttacacataatgctctaaaggagaggttgtaatgagtaccccgcgtcagattcttgctgcaatttttgatatggatggattacttatcgacagtgaacctttatgggatcgagccgaactggatgtgatggcaagcctgggggtggatatctcccgtcgtaacgagctgccggacaccttaggtttacgcatcgatatggtggtcgatctttggtacgcccggcaaccgtggaatgggccaagccgtcaggaagtagtagaacgggttattgcccgtgccattagtctggttgaagagacacgtccattattaccaggcgtgcgcgaagccgttgcgttatgcaaagaacaaggtttattggtgggactggcctccgcgagtccactacatatgctggaaaaagtgttgaccatgtttgacttacgcgacagtttcgatgccctcgccagcgccgaaaaactgccttacagcaagccgcatccgcaagtatatctcgactgcgcagcaaaactgggcgttgaccctctgacctgcgtagcgctggaagatagcgtaaatggcatgatcgcctctaaagcagcccgcatgcgttccatcgtcgttcctgcgccagaagcgcaaaatgatccacgttttgtattagcagacgtcaaacttagtagcctgacagaactcaccgcaaaagaccttctcggttaatgaccaggggcagtgatctcgctgcccctggttctttatctgaaattgcattcaactgacggattaatcgtcaatttaagagaaagagttacaccgtcaccacttccgtgcactgtataaaaatcctatactgtacgtatcgacagtttagtgagttttatcatgacggcggaaggtcaccttctcttttctattgcttgtgcggtatttgccaaaaatgccgagctgacgcccgtgctggcacagggtgactggtggcatattgtcccttccgcaatcctgacgtgtttgttaccggacatcgatcacccaaagagctttcttgggcagcgattaaaatggataagtaaaccgatcgcccgcgcttttgggcatcgtggttttacccacagtctgctggcggtatttgcgctgctggcaaccttttaccttaaggttccggaaggctggttcattccggctgatgcgctacaaggaatggtgctgggttatttgagccacatacttgccgatatgctgacacccgccggtgttcccctgctctggccatgccgctggcgtttccgcttgcctatcctggttccccaaaagggcaaccaactggaacgttttatctgcatggcattatttgtctggagcgtatggatgccccatagtttacccgagaacagcgctgttcgttggagtagccaaatgatcaataccttgcagatccagtttcatcggcttattaagcatcaggttgaatactaaaaaggcaaaaatcacctttctggaataagcaattccatttgaatataagagccagctcacagttctgttaatcttgcgccaacactatgactgctacgcagtgatagaaataataagatcaggagaacggggatgaactttccattaattgcgaacatcgtggtgttcgttgtactgctgtttgcgctggctcagacccgccataaacagtggagtctggcgaaaaaagtgctggtgggtctggtgatgggtgtggtttttggccttgccctgcataccatttatggttctgacagccaggtacttaaagattctgtacagtggtttaacatcgttggtaacggctatgttcaactgctgcaaatgatcgttatgccgttagtcttcgcctctattctgagcgcggttgcccgtctgcataacgcatctcagttaggcaaaatcagttttctgaccatcggtacgcttttgtttaccacgctgattgcggcgctggtcggtgtgctggtcaccaacctgtttggtttgacggctgaaggtctggttcagggtggtgcagaaactgcacgtctgaacgccattgaaagtaactatgttggtaaagtctctgatctgagcgttccgcagctggtcttgtcctttatcccgaaaaacccgtttgccgatcttaccggagccaatccgacgagtattatcagcgtggtaatttttgccgcattcctcggcgtagctgcattgaaactgctgaaggatgatgcgccgaaaggtgaacgcgtcttagccgctatcgataccctacaaagctgggtgatgaaactggttcgcctggtcatgcagttgaccccttacggcgttctggctctaatgaccaaagtggttgcaggttctaacttgcaagacatcatcaaactgggaagtttcgttgtcgcgtcctacctcggtctgctgattatgtttgcagtgcatggcattctgctgggcattaatggcgtgagtccgctgaagtacttccgtaaggtatggcctgtgctgacgtttgcctttaccagccgttccagtgctgcgtctatcccactgaatgtggaagcacaaacgcgtcgtctgggcgttcctgaatccatcgccagtttcgccgcctctttcggtgcaaccattggtcagaacggctgcgccggtttgtatccggcaatgctggcggtgatggttgcgcctacggttggcattaacccgctggacccgatgtggattgcgacgctggtcggtattgttaccgttagttccgcaggcgttgccggtgtcggtggtggtgcaactttcgccgcactgattgtactgcctgcgatgggcctgccagtaaccctggtggcgctgttaatctccgttgaaccgcttatcgacatgggccgtacggcgttaaacgttagtggcagcatgacagctggcacgctgaccagccagtggctgaagcaaaccgataaagccattctggatagcgaagacgacgccgaactggcacaccattaattcttatgctggcaacggtccgttttgtataggggccgttgccttactttttaaatgttccatcgcggcgatgcatacactctcatatttaaacagatcgtcagcgaaaaaaatgtccaacttatcaatacattcctggctcaaactatgtgcctgtaggctgaagcttaaaacctcatacccgagacgttttctaagactactatctggaatactcataatatcttcaagcacaccacttcccattcccggaagatttagtggattaaaaagaagattgatattaagcatacttattatgctaggaaactttaggagactctcatttttttgaatcgcagcaaaaatgctcccgacaggatgtatataattttgttcatagtatatagtccttaaatagtgaataaccaacctgttttttatactgatcaaattggtcattttttctgggcgaaatacagaagtgacatccattccaataaaatctttatttatacctcttatccgaatttcactaccataaagattattaattattactctatatttaacattgtcctgcagatatgtatcaaaactaagtgctggcgctcctggcttactggcatcatagttaatgttagacatataggcaatcatataattaaagttactttctgctatttcatcgcagtcacattgacccgtacttataaagaaagtgagtgctgtcatagtagactgcagcctttctttaaaagagtcgaaagccaggcttttaatatttaaatcaccataattactctgtattaagtttgtagaaaacatctcccgcctcatattgttaacaaaattattatctcatttaaatctaagtcatttacaatataagtttaagagcgacgccacaggatgaactatcaaaaatagctcatcatgattagcaaaacttaaccattttaaaataaataaacaattaaagaaaaaagatcacttatttatagcaatagatcgtcaaaggcagctttttgttacaggtggtttgaatgaatgtagcaacgaaatacagaatttcaggtcatgtaactcccggcaaaaccgggaggtatgtaatccttactcagtcacttccccttcctggcggatctgatttgcccaacgttgggcagattcaggcacagtaaacgccggactgcgcagaaaactctctcccatcagtacaaacgcaacatatttgccacgcagcatccagacatcacgaaagctatccatctttatcgcatgttctggcggcgcgggttccgtgcgtgggacatagctaataatctggcggttttgctggcggagcggtttcttcattactggcttcactaaacgcatattaaaaatcagaaaaactgtagtttagccgatttagcccctgtacgtcccgctttgcgtgtatttcataacaccgtttccagaatagtctccgaagcgggatctggctggtggtctatagttagagagttttttgaccaaaacagcggccctttcagtaataaattaaggagacgagttcaatgagccaacataacgaaaagaacccacatcagcaccagagtccactacacgattccagcgaagcgaaaccggggatggacagtctggcacctgaggacggctctcatcgtccagcggctgaaccaacaccgccaggtgcacaacctaccgccccagggagcctgaaagcccctgatacgcgtaacgaaaaacttaattctctggaagacgtacgcaaaggcagtgaaaattatgcgctgaccactaatcagggcgtgcgcatcgccgacgatcaaaacagtctgcgtgccggtagccgtggtccaacgctgctggaagattttattctgcgcgagaaaatcacccactttgaccatgagcgcattccggaacgtattgttcatgcacgcggaagtgccgctcacggttatttccagccatataaaagcttaagcgatattaccaaagcggatttcctcagtgatccgaacaaaatcaccccagtatttgtacgtttctctaccgttcagggtggtgctggctctgctgataccgtgcgtgatatccgtggctttgccaccaagttctataccgaagagggtatttttgacctcgttggcaataacacgccaatcttctttatccaggatgcgcataaattccccgattttgttcatgcggtaaaaccagaaccgcactgggcaattccacaagggcaaagtgcccacgatactttctgggattatgtttctctgcaacctgaaactctgcacaacgtgatgtgggcgatgagcgatcgcggcatcccccgcagttaccgcaccatggaaggcttcggtattcacaccttccgcctgattaatgccgaagggaaggcaacgtttgtacgtttccactggaaaccactggcaggtaaagccagtctcgtttgggatgaagcacaaaaactcaccggacgtgacccggacttccaccgccgcgagttgtgggaagccattgaagcaggcgattttccggaatacgaactgggcttccagttgattcctgaagaagatgaattcaagttcgacttcgatcttctcgatccaaccaaacttatcccggaagaactggtgcccgttcagcgtgtcggcaaaatggtgctcaatcgcaacccggataacttctttgctgaaaacgaacaggcggctttccatcctgggcatatcgtgccgggactggacttcaccaacgatccgctgttgcagggacgtttgttctcctataccgatacacaaatcagtcgtcttggtgggccgaatttccatgagattccgattaaccgtccgacctgcccttaccataatttccagcgtgacggcatgcatcgcatggggatcgacactaacccggcgaattacgaaccgaacagcattaacgataactggccgcgcgaaacaccgccggggccgaaacgcggcggttttgaaagttaccaggagcgcgtggaaggcaataaagttcgcgagcgcagcccaagctttggcgaatattattcccatccgcgtctgttctggctaagtcagacgccatttgagcagcgccatattgtcgatggtttcagttttgagttaagcaaagtcgttcgtccgtatattcgtgagcgcgttgttgaccagctggcgcatattgatctcactctggcccaggcggtggcgaaaaatctcggtatcgaactgactgacgaccagctgaatatcaccccacctccggacgtcaacggtctgaaaaaggatccatccttaagtttgtacgccattcctgacggtgatgtgaaaggtcgcgtggtagcgattttacttaatgatgaagtgagaagcgcagaccttctggccattctcaaggcgctgaaggccaaaggcgttcatgccaaactgctctactcccgaatgggtgaagtgactgcggatgacggtacggtgttgcctatagccgctacctttgccggtgcacctagcctgacggtcgatgcggtcattgtcccttgcggcaatatcgcggatatcgctgacaacggcgatgccaactactacctgatggaagcctacaaacaccttaaaccgattgcgctggcgggtgacgcgcgcaagtttaaagcaacaatcaagatcgctgaccagggtgaagaagggattgtggaagctgacagcgctgacggtagttttatggatgaactgctaacgctgatggcagcacaccgcgtgtggagtcgcattcctaagattgacaaaattcctgcctgatgggaggcggcgcaattgcgccgcctcaaatgatttacatagtgcgctttgtttatgccggatgcggcgtgaacgccttatccggcctacaaaactgtgcaaattcaatatattgcaggaaacacgtaggcctgataagcgaagcgcatcaggcagttttgcgtttgtcagcagtctcaagcggcgcagttacgccgcctttgtaggaattaatcgccggatgcaaggttcacgccgcatctggcaaacatcctcacttacacatcccgataactccccaaccgataaccacgctgagcgatagcacctttcaagctcgcacttgtcaacacatccagctccgttaagcgtgggaaacagtaagcactctgacggatagtattatcgataaacgccggatgacacatcacctccaggctacgatcaccccgatggcctgcgtcatccagcacttgcaggaacaggctctcactgatctcttcaccgtagaatgcactgctgaatccctgggtagtgcgcaggttgaccggcaaatcaaacgccatctgacgatccgcccgcaacgcaatgccctgctctgccgcaaacctggcaacaatcgggaaaatctgcgggaacatatgcacatgatgatggctatcaagatgcgtaggtttgcgtccaaatagctcaatgaaacgcaaatactgactgacaagctcctgagtaatttcttccagcggtaaagcatcttcttctgccaactgccagatccattttcccagcacaccatcgcgggttaaccccggcatagctgtcagtggcttacccatagtaaggacaaagtgcatccctatggccagactcggttcatcacgactcaactgcaccgcatggtcaatagcctgcccattcaccagcgccgtcgtgctcgtgacaatcccattgcgacaggcctcgataatgccgtagttctgacctttgcttaagccaaaatcatcggcattaacaatcagtaagcgttccataatcagcctcggttaatgtgcttttttaagctctgcgatgcagtcggcaaagtttggcagccatttctcgtgcgccagaatcatctcgcgtgccagcagctcagcatcgcgatcggaatgcaccaacggactaaggtttagcgccagtaacacatcgttaaattctccgctaagtgcggcgttactggcagcaatctcgaagcctttaatggtgtgaatcagccccattactttatcatcgaaatgcgtaatgcgcggatgtggcgtcgcgccatcgcgccccagcttacaggtcatttctactgcccagtctgccggaatattatcaatctgcccatgatgcgggatattaacgtaatgttctgcttgcttgtcgttgtagatagcgttgatcacttcgcatgctgcatcagagtaataagccccaccgcgctgttccagttctttcggcttaactttcagctcaggatttttatacagctcaaaaagttgtttctcgactttctgtactacctgcgctcgtgcgccgcctttgtagtattcgcccatttcaatagccagcatctctttctgcttgaagtaatacagcagataagaacatggcagcagattcaagctacgaattaagccctcactaaatggcagatcgaaaatattttttacagaggacgcttttaactgcccactcgccacaccatcaagcaattcggcaaagcggctcttgccatttatcagcacatccttaatgaacaccatatggttgaggccgaacaaatcgatagataaatcatcgctgtctttcagcatcagaacatcgcgaataaacatcttcatgccgatcggaatattacacacgccgataaagcgtttaaatccggtatgacgataaacggcttcagtgaccattcccgccgggttagtgaagttaatcacccatgcattcggacaaagttcttcgacatcttttacgatgtcaaaaatcaccggaatggtacgcagacctttaaacaaaccgcccgcgccgttggtttcctgaccaagataaccatgacttaatggaatacgttcatccagttcacgcgccggtaattggccaacgcgcagttgggtagtaacgaaatcagcatctttcaatgcttcgcggcgatccagcgttttataaagcttcatcgggacgccagcgttatcaatcatccgttggcagagatcgaaaataatatccagtttcggtttaccaccttcgacatccaccagccataattcgctgaccggcaattcgtgataacgcttaataaatccttccagtaactccggggtatagctgctcccgccaccaatagtgacgacttttaatttctggctcataatttctcccttcagtacagaatactgatatctggcatatctgcccccccggacataaataatccagcaacaggacagatatgtgaattgtcaggtataacgacttactgattaaattcagtcaatttcttacgatagctcttaggcgtaaaggacgttaatttcttaaacgttttaataaacaaactcgggctactataaccggcctcaaacgcaatatccgtcacactatagttggtcatttccagttgttttttggcaaaattaatacggatttcattaataatctgcattggcgttttgccataatatcgttgagtcgctcgcgtcaaatattcctgacttttggcactcaacgccaccatattctccagcgcgctttcactaaactgctctttatcatgcatcttttctaccgtacttttcagccactgcggtacatcatcaatcacctgttcttcgcggtaatgacgtaaacggttaatgacataaaaagtaaccatctcaacaaactcttccagccctgtttcgcggaaattcaaactagaaatcactgtttccacataggtgagaaaagcgttattggtccggtatacctggctagcgacaaagcaataaggcaacaatggcaggtaatgctgctcaaaaaagcgtttactgatcccaacgttcaatatgcgcgtggcaccaaactcataaaaactttgatggtggctacctaacggaataaaaacaaaatcgccccgttccagtaacacgcgcttaccgttaatctcctggaaataacgcccggttaataccagagtaaattcataatagtcgtgctgatgcagtccgctgatactctcagttttgttatagataaacacatggaagtttttgccattaaacaactgctgttctcgggcagtggcaatttccggcgcgttaatcactggctgcatcatcgactccttatgccttcagtttttcatgaagctcaattaattcagtaatcagttcacgcgcaagcatggacgtcattaaatgatcctgagcgtggaccagcaccagactcactttcatcttaccttcgcccgcatcgccttcaatcagtttcgtctgtaccagatgcgcttcattcaatgccatccgactctgatccatcatggcttttgctgcggcaaaatcgccctgcttcgcctgtttcagtgccgcatacgccaggctgcgcgcttgtccggagttgatgatcagccccatcaccacttcttccagctcttcagcttccgtttgcgtatcgggaatgttatcgagatccatcatacatcgttcctctcttttcttaccggcacgattacccgtaccggcatcgattaaaatttcagggcgttagcgatatcttcttcgctctcttctttatcaatcgcattttgtgctttgttagccaccacaacaaagggcagataaattaacgttgcgatgccaaggttgaagagtgcgaccagcaatgcggcgacgctaccgttggtgttaaagaaggctcccagaccggttggcatggtccacggtgcaatattggtcaccggaggaataatgcccatgtagtacgctgcgagggtgattgccgccagaatcggttgtaccagtacaaacgggataaacatcaccgggttcatgataattggcagaccaaacagaatcggttcgttaatctggaagatgccggacggcagcgccagttttgccacctgacgataatcagcacggcgagaggcgataaagatagccaggatcaggcctaaagtcgcaccactgcccccaaggaaaataaaggagtccagcatcggcttggcccagatatggaaggtcttaccggctgccagcgccgcttcgacggaaccatattgctgataggtcgcgatattttccagtgcccacggcgtcataatgccgttgtccagtgcggtcagcgccagcgcgccatgaataccgaagaaccagagcagtggaacaaagatcacataggcccagcccaccacgctacccaagcttgccagtggggtactgatggtatccataatgatctgatggaagttggtgccccaggtattcaacgcccaggcaataatccccatcacggaaagaataataaagccgggaattaatgcgctgaaggaacggcttacactagcaggtacgctgtcgggcagtttaatgacccaattgcggcggacaataaaggtaaacatttctgccaccaccaggccaataataatcccggagatgatattcgccccacctaaccagtttgcaccaaccgcataggcctcaccgacactatatggggtgacggtcataaatgctgcaacggataacaacccagccgccagcgcatcgactttacgctcttctgccagcgccatgccaataaagaacggtgccattaaagacattattcctaatgttccgttatatacgttgccgccaatacctttcagaccattaagtgtttcaatggtactggcgtcgaggcgaatacctaaggaataaaaaaagctcccctccccaaagcttagaaaaacgttgttaattaatacaaacatggcccccgcaagggttaacggcattaagcgaataaagccatttttgattgcattaacgtgtggctgctttcctattttaactgcaaaagggaggagtaccttttcaaggcttgcaataacattactcatagaaaaatacccttaaaaaccgcaatttaaatattgcggtattgatttatgaaataactctttgacgggaaaatttaaaataaattaatttgctgcggcttttttaatcgctgcaaccgcagccttaagcacgcctaaaccatcgactttgccataaagcaggctgtcaattacttcaaccggtttgttgggtaacaaacgctggatttcgggcaacatataagcaatctgcggccctaataacacgacatcggcattctgacctttttcaccagccagtgtttccggaaatgcttcaataatgaccggaacttcatatttttctgcctgtgcgcgcattttacttaccagtaaagaggtagacatgcccgcagaacaaaacagataaatgtgtttcttttccataaaactgccctcatcgacgattatctgtcagccagacactccgcaagccttaacctgcttccatgctctgggtaacttgcgaaaccaacatgactttttttgtggctgaaaggagtatacggtatagacctgagcaatagtatttctttgaccttataaattgtttctccttgacctgtggttatgaccctcttcacatttcgggcaaataattcgcgaagataattaagaactcaggccaaaaaaaaccggcgcaatggccggtttccgttgttactcaagctttcagacgaattgattacttcgcagcctgtggatcagtgtcgtattcagcacaggtctgataaccggagttgatgacatatccggtatcatctaacgcgacaaagtaggtttctgctttaccatcacgttgacccaggatgtaggtctggcaagtaccgcgagcatggatcatgctcacttcagagctaggtttacccgcaatttgtgcaacctgcgcccggctcatgccttttttgacgtctttcaccacaggctgtacaaactggtctttggtacgatcataagccgtacaacccgccagcatggttaataccgccgctgcactcagaattcctgccatattcttgttcatattccgtcctcttgtttatcagcgtgttagataagcctggaatacattgggcgctttttcaagcccgtgaacgaaacggctccgctttcagaggattcctgtatgacgttttaaccaccattcagcccgctgtcgcttgtcgtttcagtagcaacgggttagctttaaggaagttttgtcttttctgtctggaggggttcaatgacattgcaacaacaaataataaaggcgctgggcgcaaaaccgcagattaatgctgaagaggaaattcgtcgtagtgtcgattttctgaaaagctacctgcaaacttatccgttcattaaaagtctggtgctcgggatcagcggcggtcaggactccacgcttgccggaaagctgtgccagatggcgattaatgagctgcgcctggaaaccggcaacgaaagtctgcaatttattgccgtacgcctgccctatggtgttcaggccgacgaacaagattgccaggatgccattgcctttattcaaccggatcgcgtattaaccgttaatatcaagggcgcggtattggccagcgaacaggcattgcgggaagcaggcattgaactgagcgattttgtccgtggcaatgaaaaagcgcgtgagcggatgaaagcacaatatagcattgcgggtatgaccagcggtgtcgtggtgggcaccgatcatgcagcagaagccattaccggattcttcactaaatatggtgacggcggtacggacattaatccgctgtatcgtctcaacaaacgtcagggtaaacagttactggcggcattagcttgcccggaacacctttataagaaagcgccaacggccgatctggaagatgatcgcccttctctgccagatgaagtggcactcggcgtgacctatgacaatatcgacgactatctggaagggaaaaacgtacctcaacaggtcgccagaacaatagagaactggtatctgaaaaccgaacataaacgccgtccgccaattaccgttttcgatgatttctggaaaaagtaataatttgcacatattggattgtgcgaaaaagagtaatttgttcacgccggatgcggcgtgaacgccttattcgacctataaaactatgcaaattcaatacattgcaggagtcgaataggcctgacaggcgtagcacgtcagacggtgtaacctttgtcatcgacccgcctcttttttaatcgcttcccgcctgttacactggatagataaccagcattcggagtcaacagtggtacggcgtttaacttctccgcggctcgaatttgaagctgcggcaatttatgaatatcccgaacatttacgtagtttccttaatgacttacccacccgaccaggggtgtatctgtttcatggtgaaagtgacaccatgccgctctatatcggcaaaagcgttaacatccgcagccgcgtcctttctcatttacgtaccccggatgaagccgccatgctacggcaatcccgacggatcagctggatatgtaccgccggtgaaatcggcgctctgctccttgaagcgcgattaatcaaagaacaacagccgctgtttaataaacggttgcgccgcaatcgccagctctgtgccctgcaattaaatgaaaagcgcgtcgatgtggtgtatgccaaagaggtggattttagtcgagcccccaacctgtttggcctgtttgccaataggcgcgcagctttgcaagcattgcagaccatcgctgatgaacaaaaactttgttatggcctgctgggactggaaccgttaagtcgcggtcgtgcatgttttcgtagtgcgctaaaacgttgcgccggagcatgctgcggtaaagagagccatgaggaacatgcgctacgcttgcgccagtctctggagcgtttgcgggtggtgtgttggccttggcaaggggcggtggcgctgaaagaacagcacccggaaatgactcaatatcatattattcaaaactggctgtggctgggggcggttaatagcctggaagaagcgacaacgttaattcggacacccgccgggtttgatcacgacggttataaaattctttgtaagccgctgctttccggtaactatgaaattactgaacttgatccggcgaatgaccagcgagccagttgattactgaacttgatccgggctatgaccagcgagccagttgatttcactgaacaacagtttaccttgcggttgtaaaagccgcagggtgtgcctgccatcgaaccagcacgcgccctggtcggtagtgagcaatttatcgcccagttgccacgccccgttaatcacaaacaccaccccgccgcgactgccaaaggtagtaaacgtacgttcggcaattctgactttcgccttacagacatccaggcgtgtcatgatgttgaaatccatgctcatctgccctgccgtcagtttcgcttttaccacctggtccgctgcaaaggcaaaaggctggaacggttttaaggtatggttaaagcggtctgcgctttcaaggagcatctcgccgccttccagcaacgtcactatcctttccatgccgggaaacaaagaaaactccccattcgccgcgatggatgcaatgctggcacgccagtaaaaatcacgttttgccggtgggaacgtgcaaatttcgcgcgtttcaccggcagcatttcgccacagattcacgctcattttacgcatatcaaagtattccatactcgctcccggcccgttcttttcattgttatcgttcaggtaaccgtggatggttatcggcaactcgggtgatttacgttagtggtgatcaggctttttttacaactgtttgagaagagaaaagaaaaccgccgatcctgtccaccgcattactgcaaggtagtggacaagaccggcggtcttaagttttttggctgaaagattattcagcagttgcaggcattttaccttttgccgctggacgttctgtcagacgcttctcaaaattagcattaaattgctttttctgttccggcgtcaggatgttgtaaattttgttctgggtttccatgtgcgccagcatgttagctttgcgctgttcttccatttttgcgatctgcgcttcagcttttactttatcgaaggtatcgctggcaatgatgtcatgcattgcgcggcgttcttccagcggcggacgtttcatctggtcacgctggcctttcatgatttcgcggatctgctgtttctgcgcgtcggtcaggttcaggtctttgaacatcatgtcctgatgcggaccgaacttgcctttgtggtgcatcatcggcttcgcgtcagccggtgctgcggtagtggtgtctgcggcatgggccaggttagccgcgccaagagccagggtagaggcaacaaacagtgcagttaatttacgcatattctatatccttcctttcagttatttattacggctttcttaagtagcgtgccgtgttgacgagattaactttactgactttagcgtcaattaatcagagcaacggtaaaacaatgaaagtgtaaaaaacacttttgcgccaattatggagaaaaaaagaaaatttgatggagagtgatgagagaatattacaacacgatgattttgcagagattatgaagaactataccggatgactggtgataaataaagcaaataaccaggattaatctgtattaatttataagaaagcaacttaatacccgcagaatgatttctgcgggtaagtattagcttattttttcgagcattaatcccgcgcgtaatcccaacgctaccaacggattagggaataacacatactctacatcatgggttacggtaaaacgttcctctccgtcctgcgccagcaatgttcctttctcaaacggcataaaattcagcgtgtcacttgccatatgcatttcgaaggacgggctgtggcgagtaatttggctaaccacccgataacggagcggcggtgttctcacgataccgacactctcaccagatagcagcgcagcaattgcgctggcagttactgcaaactggcgaagatcgttttgcccaaagggcaacgctttgccaagttccagcgtacaggccagcgcgccaaaatgtctggcgctgaaatgggtaaacgtaccaccaggttcctgatggaacaccagcgcctccagccccgccgcacccagccacgtcagaaatttctcgtcccagggaatgtcgcgttgcggtaatacaccgaactgcggatgcaaggagccacgaattgcggtatgtagatcaaggtgccagcgcacagattctttgccctggtcataaaaatcttccaggcactgttccagttcgcgcgcccgacaggtttctccgctttcagcaaatagctgccaacgaccgccaaacattcgattcatatcgctatggcaataacgtttcccttgcttcagcgcaggaggattcccgaggatcaccagcaaccgccaacgtaacgggatctcgccgtgagatatcgcgccaagcaacgcgtccagcatctccacaggtgccgtctcattaccgtgtattcccgcactaatcaccagtgcgccttgcggtggcgttaatggcgtcagttccagcacaccatcgcccagccagcgccagcgaacgccgttgatttctcgctcggtgataaccggttttttacccgttaaggtcagagcaagaaaattatccattgccccctccctcgcgctggaacggataaacgctaccgagattcagtaattggctcaatacatccagtgcttcccgcccttcgcgcagcaattgcgggtcggccagatcggcagcagtaaggcgatcgcggtagtaacgatccacccagtcattgagcgcattaaacagcgtatcgttcatcatcaccgccggattcaccgcccggcgttcttcttctgtcaataccacccgcaaccgcaggcacgccgggccgccgccattcgccatgctttcacgtaaatcaaagacttttagttcgctaatcgggttgtcagcggcaaggagttcattgagataaccccatactccggcgtgttcccgacactcctgaggcagcaccaacatcatggaaccatcatcgcggctcagcagttggctgttaaacagataggtagacaccgtatcagacacggaaacctgagttgccggaacttctatcgccataaaaccattgacccgcgcacgcaggtttgccagtaactgactctggcgagcgaacgcctgttggtggcaaaacagcacctggcggttactcacggcaatcacgtcattatgaaaaacgccctggtcgataacgtccgggttttgctgggcgaaaatcacctgttggggattcacctgattcagccttgccaccgcctcgctggcttcgcgagtctgtcgcgccggataacgggaaggccgggtatcattgccttcttctcgcccgtagacaaaaagttgcatacccggttcaccgtaatgaccgccgagacgattgtggtttgccgccccctcatcaccgagcaacgctacctgtggcaacgcgctatggacgctaaatttctcttcgtcgttaaaaatcgcttttaacaggctttcagtgacgggcgcttccaggctacggtgaaatttattgttcaggttggcaacggtgagatgcactttgccatccagcgtatcggcagatggcgcgatcgttgccgcattggctacccacattgggctagcggaactgacgctggaaagccagtgcggtgcctggcgtgcaactttttccagtacctgctcatcgctaccactgaatcccaactgacgcagcaccggaataaacggacgctcgtgcggcgggatcacggcctgggggaatcccgcatcggcaagggctttcattttcagtaagccctgcttcgccgccagtcgcgggttagacacctgaaaacggtgacgggtagaggcttcattaccaaagctcaggcccgcgtaatgatgcgtcagccctaccagcccgtcgaaattgacttcccaggcgttcatcgcaccacctcatcggaaaaatccagcccggggttaagcgtggcgggcaatgttaagctgtcgctctccaggctcgccatcggccatgcgcagtaatctgcggcataccaggcgctggggcgatggttaccggaagcaccaatgccgccgaatggcgcggtactggcagcaccggtaagcggtttgttccagttaacaatccccgcccgcgcctccagcaacagttgatcgaacttttcccgctcgggggaaaccagaccgcaagagagtccgaagcgagtgttattcgccattcgaatcgcttcatcgaaagtatcataacgccagacgcgcaataacggtccgaacacctcttcatctggtacgccagcaacgcctgtcatttcaatgatccccggcgtcagcaagcttgtccctgcttgtaataagcgcggcgcaagcaggggtcgtccgcccatcgcttccagttgctgccatgcagtaaccacctgctgtgcggcctgttcagaaatcagcccgccaataaacggctgcggttcgtcatcccagttgcccggcgttaatcgctggctgacggcaaccagacgagcaagaaacgcatcgccctgcgccccgcttttcagcaataaacggcgggcgcaggtgcagcgttgaccggctgtgacaaacgcgctctgaatggtcagatggacagccgcgtcgatatccgccacctcatcgataattagcggattattaccgcccatctcaagggcgagaattttctccggctgaccggagagctggcgatgcaactggtagcctgtattggcgctaccggtaaacagcaaaccgtcgagatcctccagcgcactcagcgcctgacccgtttcacgcccgccctgcaccaggttcagcacgcctggcggcaagccagcctgctgccataaacgcattaccgcttcgccactccacggtgtcagttcgctgggtttaaagataatggtgttacctgccagcaatgccggaacgatatgtccgttcggcaaatgaccagggaaattatacggcccaaacaccgccagcacgccgtgcgggcgatgtcgcaggctcgccgcgccgtccggcatttcactacgctgctcgccggtacgaacgtgatacgccttaatacttatcgcgattttattgatcatcgccgtcacttcggttgccgcttcccagcgcggcttacccgtttctctggcaataatcgcggttaattcggctttattgctttccagcagtgcggcaaagcgttcgacaacggcatgacgttcagcaaaactaagccgcgcccagcgcggaaacgccgcacgggctgcccgacaagcctgctcgacctgagcggcatcggcatcattgccttgccataacacctcgccgcttaccggattacgcttcacacggcttgcgccctggcccgttatccagtcaccgttaatccataaagtcatgctgttttctcctctgcgcacaggcgcaccagacgaacgcgatccccggcgtggcatttgagggcatccagttgtgcggcggttaaaatcaaacgctcggttgccggatcggtacgcaccagcaccacgcggaaatggtgataattttcattggcgaccaggcaggctgggaaatcgccctgcgcaggctgcccttctgccacttccaccagccgacttttacggatggcgcgcacgcggtcgatgtcacactcaagcgtcggcccaccgtcaaagatgtcgatatagttacggtagcgaaaaccttctttctccagcaccgcgcgggcaggcgcggtttgcggatgtacctgaccgatgacgtcctgggcttcctgggataaaaagtgggtatagatcggatgtttcggcatcagttctgcaataaatgccttttgcccggtgccgcagagaaaatcggcgcggctaaaatccatgctaaagaagcgtttaccgaggctttgccagaacggactatagccgtgttcgtcaatcaccccgcgcatttcagcaaccactttgtcattaaacttgtcgcgaaaagccgccataaacataaagcggcttttgctcagcaaatagccgttgccctctttgcgccagtccgggtcgagaaacagcgtgcacagctcgctgctgccggtgtgatcgttactgagaaacagcgtcggcaatgcgttatagacattcagctctttactggcgtgaaccaacgtgccgacgcgatagttgtaccagggatcgttcagcccaaccgccacctcaatggcacaaatccccgccacggtgcctgtctcgctatcttccagcacgaacacatagccctgctcacttttgggcagttcgccttgccaggttttgattgccctttcgatacgcgcgctaagcgtggcttcattggcgggaaggctcgtcaggccgccgcccgttttgctggcaagctgcatcagcgcgctgacatcacttcgctcaacgggacggatgaccatcatgatgaacctcggctaacaaattatttcaactactacctcggctaacaaagtgttcgcaagcagctgcaaagcgatccagtccggtcgtcacctcttcttcgctgacattgagcgcaggcgcaaaacgcaccacgttgccacccgcaatcagtaccatcacgcctgctttcgccgcttcctgagagatctgtttcgcttgcccggcgtaatcggcattcagtacacagccaatcagcaaacctaagccgcgaacttcactgaacaaaccatagcggtgattaatagtattaagacgctcaacaaaccagtcgtgacgctgtttaacgccattaagcatctctggtgtgttgatgagctccagcactttgcctgccaccgcgctggccagcggattaccgccataggtggtgccatgagtgccaacggtcatcacgcgggcgcactcttcggttgccaacaacgcaccgaccgggaaaccgccgcccagcgctttggcggtagttaacagatcaggcgtcacgccgtagtgcatataggcatacagttccccggtgcgcccgacgccggtttgtacttcatcaaaaatcaacagcgcattgtggcggttacacaattcacgcagaccttgtaaaaacgcgttgctggctggcaccacaccgccttccccctggatgggttcgacaatcaccgcacaggtagagtcgtcaatcagcgcgctggcagagttaatatcgttatatgcagcatgacgaatatccgccggcagtggcgcaaaatcctgactataggctggctgcccacccgcactgacagtaaacagcgtgcgaccatgaaacgcatttttgaacgccacgatgccgctcttatggctgccgtagcggtcgtgagcgaatttacgcgccagttttagcgccgcttcgttggcttccgcaccggagttacaaaagaagacgcgatcggcaaacgtggcgtcgatcaattttttcgccagtcgcagtaccggctcgttggtgtaaccgttgccggtatgccagaacttactcgcctgttcgttcagcgcttcacgcagttccggatgcgcatggcccagcgcgttcaccgcaatgccacccgcgaagtcgatatactctttcccctgctgatcccacaagcggctaccttcgccacgtaccggtataaagggtgccggagcgtaaacaggtatcatccattcatcaaagttttcacgcgtaattggctgagacatagcgacctctacagtaaataattcgttatttatatgttaataataagtaatgtttgcgctgtaaatgtagattgcagggttcgtgccagccagtgataaaagtgcataaacggcggaggctaactggaaatcaaggagttataaccaaaccatatgcatttaaagtgcatataaagtgaatacgtttgcgatgtgggtgaataaaaagaataaaaaacgcaatgttatgcagaagtaaaatataattctggaattgtgatcattgacgaaatttactggaaattactgcgccattctgacgcagcgcgcaccaaaagcgggcatttttttgcgccatcgttgacatcattaacaaccatcgatcaaatcacttaacaacaggcggtaagcaacgcgaaattctgctaccatccacgcactctttatctgaataaatggcagcgactatgaaatttgtctcttttaatatcaacggcctgcgcgccagacctcaccagcttgaagccatcgtcgaaaagcaccaaccggatgtgattggcctgcaggagacaaaagttcatgacgatatgtttccgctcgaagaggtggcgaagctcggctacaacgtgttttatcacgggcagaaaggccattatggcgtggcgctgctgaccaaagagacgccgattgccgtgcgtcgcggctttcccggtgacgacgaagaggcgcagcggcggattattatggcggaaatccccagtctgctgggtaatgtcaccgtgatcaacggttacttcccgcagggtgaaagccgcgaccatccgataaaattcccggcaaaagcgcagttttatcagaatctgcaaaactacctggaaaccgaactcaaacgtgataatccggtactgattatgggcgatatgaatatcagccctacagatctggatatcggcattggcgaagaaaaccgtaagcgctggctgcgtaccggtaaatgctctttcctgccggaagagcgcgaatggatggacaggctgatgagctgggggttggtcgataccttccgccatgcgaatccgcaaacagcagatcgtttcagttggtttgattaccgcagtaaaggttttgacgataaccgtggtctgcgcatcgacctgctgctcgccagccaaccgctggcagaatgttgcgtagaaaccggcatcgactatgaaatccgcagcatggaaaaaccgtccgatcacgcccccgtctgggcgaccttccgccgctaatttagcagctctcctggctcaaactgggtcaggagaattaaccttgagaaaaatcaacaaactgtcagtaatgatttgttgcctgccgtcctttgttataccgtctctgcgtttttagttgtctgaccacttctctattatcaagtttgatataggaaactccacgatgaacgctgagcgtaaatttctttttgcctgtcttatttttgcgctggtcatttacgctatccacgctttcggtttattcgatctgctcaccgatttaccccacttacagacactcatccgccagagcggatttttcggctatagcctctatattctgttattcatcattgccaccctcttgctgttaccaggaagcatactggtgatcgcgggaggaatagtttttggcccgctcttagggacactactcagtttaattgccgccacgctggcctccagctgcagtttcctgctggcgcgctggctgggacgtgatttactgctgaaatacgttggccatagcaataccttccaggccattgaaaaaggcattgcgcgtaacggtattgattttcttattctgacccgcttaatcccgttgtttccttacaatattcaaaattacgcttacggattaaccacaatcgccttctggccttatacccttattagcgcactcacgaccctacccggtattgttatttataccgtgatggcaagcgatctcgccaatgaaggcattacgctgcgctttattttacaactctgtctggcgggcctggcgctgtttattctcgtccagctcgcaaaactctacgcccgacacaaacatgtggatctgtctgctagccgccgcagcccacttactcacccaaaaaatgaaggataaaacgatgttgcaacattatagtgtgagttggaaaaaaggactggctgcactctgtttactggctgttgctgggcttagcggctgcgatcaacaagagaatgcggcggcaaaagtggaatacgacggacttagcaacagccaaccgctgcgtgtcgatgccaataaccatacggtaaccatgctggtgcaaattaatggtcgtttcctcaccgacgacactcgtcacggtattgtgtttaaagatggctccaacggacataaaagcctgtttatgggttatgcgaccccgaaagcattttatgaagccctgaaagaggcaggtggtacgccgggcgaaaacatgacgatggataataaagaaacgactcatgtcacaggcagcaaactggatattagcgtcaactggcaaggggcggcaaaagcgtattccttcgatgaagtgattgttgacagtaatggcaagaaactggacatgcgctttggcggtaatttaacggcagcagaagagaagaaaacgggttgcctggtgtgtctggatagctgcccggtcggcatcgtcagcaatgcaacatacacttatggtgcggttgaaaaacgtggtgaagttaaattcaaaggcaatgccagtgttctcccggcggataacacgctggcaacggttacctttaaaatcgccgaataaagccaggataaaggatgatgatgatgcaaagccgaaaaatctggtactaccgtataaccctcatcatcctgttgttcgctatgctgctggcatgggcgctgcttcccggcgtccatgagtttatcaatcgcagcgttgcggcgtttgccgccgtggaccaacagggtatagaacgctttattcagtcttacggcgcactggcggcagttgtcagcttcttgttgatgattttgcaggccattgctgcaccgctacctgcgtttttgatcacctttgccaatgcgagcctgtttggcgcgttctggggcggcttgctgagctggaccagtagcatggccggcgcggcgctgtgcttttttatcgccagagtgatgggccgcgaagtggtggaaaaattaaccggcaaaaccgtgcttgacagtatggacggctttttcactcgctacggcaaacacaccattctggtctgtcggttattgccttttgtccctttcgatccaatcagctatgctgccggtttgactagtatacgttttcgcagcttttttatcgccaccgggcttggtcagttaccggcaactattgtttattcctgggcgggcagcatgttaacaggcggtactttctggtttgtcaccggactgtttattctgtttgccctgaccgtggtgatttttatggcgaagaaaatatggcttgaacgccagaagaggaatgcctgatgggtttaccgccgcttagcaaaattcctttaattttacgtccacaggcgtggctgcatcgtcgccattacggcgaggtgctaagccccattcgctggtgggggcggatcccgtttatcttttatctggtgagcatgtttgttggctggctggagcgcaaacgcagtccgctcgatccggtagtacgaagccttgtcagcgcgcgcattgcgcaaatgtgcctgtgtgagttttgtgtggatatcaccagtatgaaagtcgccgagcgcaccggcagcagcgataaactgctggcagtggctgactggcggcaaagcccgctctttagcgatgaagaacggctggcgctggagtacgccgaagccgcaagcgtaacgccgccaacggtcgatgatgccctgcgtacccgactggctgcgcattttgacgctcaggcgctcaccgaactgacggcattgatcggcctgcaaaatctgagtgcccgttttaattctgccatggacattcccgctcaggggctgtgccgtattcctgaaaaacgttcttaaggagagatgatgcgccattgtgggtggttgctgggattgttaagcctgttttctctggcaacacatgccagtgactggcaagaaattaaaaatgaggccaaagggcaaaccgtctggtttaacgcctggggcggcgataccgcaattaaccgctatctcgactgggtgagcggcgagatgaaaacccattacgctataaacctgaagattgtccgtctggcggatgccgcagacgcggtgaagcgcattcagaccgaagccgcagccggacgtaaaacgggcggcagcgtggatctgctctgggtgaacggcgaaaacttccgcaccttaaaagaggccaatttattacaaacgggctgggcggagactctgcccaactggcgctatgtcgacacacagctgccggtgcgggaagatttttctgtgccgacacaaggtgcggaaagcccctggggcggcgcacaactgacgtttatcgcccgccgcgatgttacgccacagccaccacaaacgccgcaagccttactggagtttgctaaagccaatcccggcacggttacctatccgcgcccaccggactttaccggcacggcgtttcttgaacagttgctgattatgctgacgcccgatcccgccgcattaaaagaagcgccggacgatgcgactttcgcccgtgtcactgctcccttgtggcaatatcttgatgtgctgcatccgtatttgtggcgcgaaggaaaggatttcccgcctagtcccgcgcggatggatgctctgctgaaagccggcacattgcgcctgagcctgacctttaaccccgcgcatgcgcagcaaaaaatcgccagcggcgatttgcctgcaagcagttacagttttggctttcgcgaggggatgattggcaacgtgcatttcgtcaccattcctgccaacgcgaatgccagtgctgcggcgaaggtagttgccaatttcctgctcagtcccgatgcgcaactgcgtaaagcagatcccgctgtctggggcgatccttctgttctcgatccgcaaaaactgcctgacgggcagcgcgaaagtttgcaaagtagaatgccgcaggatctgccgccggtactggctgaaccgcacgcaggttgggtaaatgcgctggaacaagaatggctacaccgttacggtacgcattaatctttttgctgtgggcgatggtggcggtgatttatgcaccgctgatcccggcagctctcacgctgataagccctgctttgagcttgacacactggcaggcgttatttgccgatccacagttaccgcaggcattactggcaacgctggtgagcacaaccatcgcggcggtcggggcattgttgattgccctgctggtgattgtggcgctgtggcctgggccgaaatggcagcgtatgtgcgcccgtctgccgtggctgctcgccattccccatgtggcttttgccaccagcgcccttctgctctttgctgacggagggctgctttatgactatttcccgtatttcactccgccaatggaccgatttggcatcggtctgggcctcacccttgcagtgaaagaaagcgcatttctgctgtggatcttagcagcagtattgagcgaaaaatggctgttgcagcaggtcattgtgctggatagcctgggctacagccgctggcaatgcctgaactggctgctgttgccctccgtcgcgcctgcgctggcaatggcgatgctggcgattgttgcctggagcctgagcgtcgtggatgtggcaattattctcgggccaggtaatcccccgacgctggcggtaattagctggcagtggttaacccagggcgacattgaccaacaaacaaaaggcgcgcttgccagcctgctgttgatgctgttactcgccgcctacgttttgctgagctatctgctatggcgcagctggcggcgcactattccccgcgtagatggcgttcgcaagcctgccacgcctttattgccgggcaatacgctggcgatttttttacccttaaccggtgtgctgtgtgtggttctgctggcgatcctcgcggatcagagcacgatcaatagtgaagcgctcatcaacagcctgacaatggggctggtggcgacattcatcgctttgctcctgttactgctgtggctggaatgggggccacagcgtcgccagttgtggctatggttgcccattttattacctgctctgccactggtggcgggccagtacacgctggcgctatggctgaaactggatggaagctggacggcggtggtctgggggcatctgctgtgggtgatgccgtggatgctgtttatcctgcaacccgcctggcagcgcattgatagtcggttaattttgattgcgcaaacactgggctggagccgggccaaaatcttcttttacgtgaaatgcccactcatgttgcgccctgtgctgattgccttcgcggtgggatttgcagtcggtattgcgcagtatatgccaacgctgtggctgggcgcggggcgttttccgacgctcaccactgaggcggtggcattaagcagcggcggcagcaacggtattctcgccgcccaggctttatggcaactgctattaccgcttattatttttgccctgaccgcgttagtcgcaaaatgggtaggttatgtcagacaaggactccgctaatgctctgcgtgaaaaatgttagcctacgtttaccagaaagccgcttgctgacaaacgttaactttacggtggataaaggtgacattgtcacgttaatggggccgtctggctgtggaaaatccactctgtttagttggatgattggtgcactggccgaacagttttcttgtacaggtgagctatggctcaatgagcaacggattgacatcctacccaccgcacagcgtcagattggcattctttttcaggatgcactgttatttgaccagttcagtgtcgggcaaaatttactgctggcgctaccggcgacacttaaagggaatgcccgacgtaatgccgtgaatgatgcacttgagcgtagtggccttgagggagctttccatcaggatcctgccactttgtctggcggtcagcgagcgcgcgttgctctactacgcgcccttctcgcccaaccaaaagcgttactcctggatgagccattcagccgtcttgatgtggctctgcgcgataattttcgccagtgggtgttcagcgaagttcgcgccctggcgatccccgtcgttcaggtaacgcacgatctccaggatgttcctgctgatagttctgttctggatatggcgcagtggagtgaaaattacaacaaactgcgataacgcaaagtttttctcaatgcgtcagttcagaatggcgcactcaaaactacaatgtcgggattttcgatgaaacgtgtttctcaaatgaccgcgctggcaatggctttagggctggcttgcgcttctagctgggccgctgaactggcgaagcctcttacacttgaccagcttcaacaacaaaatggcaaagcgatagatactcgccccagcgcgttttataacggctggccacaaaccttaaatggcccttctggtcatgaacttgccgccttaaacctctctgccagctggcttgacaaaatgagcaccgaacagctcaacgcgtggatcaagcaacataacctgaaaaccgatgctccggtggcgctgtacggtaatgacaaagatgtcgacgccgtcaaaacgcgactgcaaaaagcaggtttaacgcatatctccatcctgagtgacgcgctaagcgaaccttcccgtctgcaaaaactgccgcattttgagcagctggtttatccgcaatggctgcacgacctgcaacaaggtaaagaggttacggcgaaacctgccggtgactggaaagtcattgaagcggcctggggcgctcctaagctttaccttatcagccatattcccggcgctgactacatcgataccaacgaagtggaaagtgaaccgctgtggaacaaagtttctgatgaacaactaaaagcgatgctggcaaaacacggcattcgccatgacaccacggtcattctgtatgggcgtgacgtatacgctgcagcgcgtgtggcgcagattatgctttatgctggtgtgaaagatgtgcgcctgctggatggcggctggcaaacctggtccgacgcgggactgcctgttgagcgcggaacgccaccgaaagtgaaagcggaaccggatttcggcgtgaagatcccggcacaaccgcagttgatgctcgatatggaacaggcccgtggactgctgcatcgccaggatgcaagcctggtgagcattcgtagctggccagaatttatcggtacgaccagcggttacagctatattaaaccaaaaggtgaaatagccggcgcacgttggggacacgctggtagcgacagcacgcatatggaagattttcataacccggatggcaccatgcgcagcgccgatgatattaccgctatgtggaaagcgtggaatatcaaaccagagcagcaagttagtttctactgcggcaccggctggcgcgcgtccgaaacctttatgtacgcacgcgccatgggttggaagaatgtttccgtgtatgacggcggctggtacgaatggagcagcgatccaaaaaatccggtagcaaccggtgaacgcggcccggacagtagcaaataacattgcaattactgacgctggaggctcttcagcgtcagatacccactccacacccgcgtaaaggtcgtcatccagcacaacgcaccgaagatccacgcaaaccacgcaaaccatgcagggaataaacatcccagcacaaacagtaagatcgtttctgtgccttcggttaatccccccagatagtaaaagctcttatgtgcataaccggggttatcaatctgatgttttgctgccagtgcagcaaaggcgagaaaactgctgcccgtgccgataaacgcaaacaacaaccagccgcctgccagcgcattttgctccggtgcagcaagaataaagccaaacggcaccagcgcgtaaaagagaaaatcgagagaaatatcaagaaagccgcccgcgtcggtaagctctctgcgccgcgccagcgcaccgtccagaccatcaagcagcctgttcaacaaaatgacgactagcgccgccagataccagcccagcgccagaaacggcagagccagcacgccgatggcaaatcccactaatgttaaaccatctggcgtaatgcccggtttatcaagaacccgcacgcactgatgcaacaacggtttaatccggggatgaagatggcggtctagcacaggcactccttaaatataaagcctttctgattgagcaacagtgcggatattatggcatttttcgcttatctgcccgtgtgtaatttatgaaaatgattgaagttgttgccgccatcattgaacgtgatggcaaaattttactcgcgcaacgccccgcccagagcgatcaggcgggattatgggagtttgccggtggtaaagtcgagccggatgaaagtcagcggcaggcgctggtgcgtgagttacgcgaagaactgggcatcgaagcaactgtgggtgaatatgttgccagccatcagcgagaagttagcgggcggattatccatcttcatgcctggcacgtacccgacttccacgggacgttacaggcacatgaacatcaggcgctggtctggtgcagtcctgaagaggcgctgcaatatccgctggcccctgctgacattccattattagaggcgtttatggctttacgcgccgccagaccagcggattaattatggctttacgcgccgccagaccagcggattagtgctaagggttttgtcatcacgctggcattgcagcagtattccttcggctttaattaccgccccttcagaataattttgatcctgataaacgcagcactgagtacagggctgcgcactctgcccgccactactgaacacttctggcggtacgtttacctccacgtccggacgataatgcgggttagccagtgcaattaatggaaatgctaatactacggcgaacaatgctcgactcacagggaactccttaacgttattgtctctgctactgataacggtagccgggtggcaaaactttagcgtctgagttatcgcatttggttatgagattactctcgttattaatttgctttcctgggtcatttttttcttgcttaccgtcacattcttgatggtatagtcgaaaactgcaaaagcacatgacataaacaacataagcacaatcgtattaatatataagggttttatatctatggatcagacatattctctggagagtttcctcaaccatgtccaaaagcgcgacccgaatcaaaccgagttcgcgcaagccgttcgtgaagtaatgaccacactctggccttttcttgaacaaaatccaaaatatcgccagatgagtttactggagcgtctggttgaaccggagcgcgtgatccagtttcgcgtggtatgggttgatgatcgcaaccagatacaggtcaaccgtgcatggcgtgtgcagttcagctctgccatcggcccgtacaaaggcggtatgcgcttccatccgagtgttaacctttccattctcaaattcctcggctttgaacaaaccttcaaaaatgccctgactactctgccgatgggcggtggtaaaggcggcagcgatttcgatccgaaaggaaaaagcgaaggtgaagtgatgcgtttttgccaggcgctgatgactgaactgtatcgccacctgggcgcggataccgacgttccggcaggtgatatcggggttggtggtcgtgaagtcggctttatggcggggatgatgaaaaagctctccaacaataccgcctgcgtcttcaccggtaagggccttagttttggcggcagtcttattcgcccggaagctaccggctacggtctggtttatttcacagaagcaatgctaaaacgccacggtatgggttttgaagggatgcgcgtttccgtttctggctccggcaacgtcgcccagtacgctatcgaaaaagcgatggaatttggtgctcgtgtgatcactgcgagtgactccagcggcactgtagttgatgaaagcggattcacgaaagagaaactggcacgtcttatcgaaatcaaagccagccgcgatggtcgagtggcagattacgccaaagaatttggtctggtctatctcgaaggccaacagccgtggtctctaccggttgatatcgccctgccttgcgccacccagaatgaactggatgttgacgccgcgcatcagcttatcgctaatggcgttaaagccgtcgccgaaggggcaaatatgccgaccaccatcgaagcgactgaactgttccagcaggcaggcgtactatttgcaccgggtaaagcggctaatgctggtggcgtcgctacaagcggcctggaaatggcacaaaacgctgcgcgcctgggctggaaagccgagaaagttgacgcacgtttgcatcacatcatgctggatatccaccatgcctgtgttgagcatggtggtgaaggtgagcaaaccaactacgtgcagggcgcgaacattgccggttttgtgaaggttgccgatgcgatgctggcgcagggtgtgatttaagttgtaaatgcctgatggcgctacgcttatcaggcctacaaatgggcacaattcattgcagttacgctctaatgtaggccgggcaagcgcagcgcccccggcaaaatttcaggcgtttaactgtatttaacggaacttgctccccacggaacatttcttatgggccaacggcatttcttactgtagtgctcccaaaactgcttgtcgtaacgataacacgcttcaagttcagcatccgttaactttctgcgatagcagcagatatgccagtaaagaaatcccatttgactatttttttgataatcttcttcgctttcgaacaactcgtgcgcctttcgagaagcaagcattatataatgccaggccagttcttcttcaattgtcccgttttgaaaagctgtgctacttatgctgatcatccaacttaattccgccgcccatattagcttcgcgctggatttaccggagctatgattagcgcaatcagagatatagtcactgggaaaaacagcaaatttattcaacaaggcgataacctgctctggggcttcctccatgtttgctttaaaggtattggctccatggtcgccagaaagaaaatgctccattaaggcacaataactttcgctatcttcgataccccattgatcctctaaagactcgcgtcttttacttatgatatcgatgctgtcaaaaggaagcacatgatattggaaggtatctttgccaggttcaggctttcgcggccagaactccagcgtttcagaccattgcttatgatagaatcgataaggtgcgatcaattgtagcgcctgtaacttctcgatactgagcggctcaatacctttagcctgataataatgcagttgttctttttttgctttaaaaccggcccgaacaataagccccatcataattaatagataaagaaaagagcatcccgcggtaatcaggcctctttcattcaaaccgttggatgttatcgctgcgaacacaaacattacagcgacaacacatgttaaataaaacccccacttacaaagcagcatggccttattttctttaatcatccgttcaaaattactattaaatatttcccagccattaaaagaatacttctcgctcccaggatggttttgtaataaaacttttttcatcacattccctgttattacatactttagaggcgataattttatccatgcaaaaaaaatatccaacgaattttcttgatccgctggatatttcagaatatgactcgaatagcacgaaagattcactcgcttacgctatcgccccgcttccgacttcatctgctggcggactttttttcgcactacgtttacgcggtgcagcctttttcttatcagcactgccaccactgcccggagccacaatgccgcgaaactgccgcaccggcgtacgtttggcttgatcaataagctgatatagcgtccccaccagcggctgcataaagtcctgatagcgacactgcttttcgctgatttgcgtcagcacgctttcccagtgcgcggtcatgtccggtcgcgtcgccatctccggcaggctatggaatagcgcttttccggcgtcggtggagtggatatagcgcccttttttggtcaggaaaccacgcttgaacaacagttcaataatcccggcacgcgttgcctctgtccccagaccatcggtcgcacggaggatctttttcagatctttatcctgcacaaagcgcgcgatcccggtcatcgcgctaagcagtgttgcatcggtaaaatggcgcggcggctgggtttgccgctctaccacttcacctttttcacacagcaactcatcgcctttcgccaccacaggcagtggcgtgccgtcgttttcttcatcgcgctctttgctgcctaacagcgtgcgccagcctgcttcagcaagaaaacgcgctttagcgacaaatttgcctttggcaatgtccagttcgataacacacttgcggaacaccgcatccgggcagaattgcatcagatactgacgggcaatcaggttatagaccttcgcttcgttctccgtcaggttgatcgcagaactccgtgcggtcggaatgatggcgtggtgcgcatcgacctttttgtcatcccaacagcggttgcgtatatctggatctaccactggctgcggcaacagatccggtgcatgaacactgatggcattcatcaccgcgtggcgtccggcaaaatgttcttctggcaaatagcgacaatcagaacgcggataagtgattagcttgtgcgtttcgtacagtttctggcagatatcaagcacgttctgcgcactcagaccaaaacgttttgccgcttcaatctgcaacgcactaaggctaaaaggcagcggcgcggattcactttcccgtttatcgttatagctggtgacaatagccggttgaccactaatgcggttaaccacatgctccgccagtggacgatgtaacaagcgcccttcttcatcctggtacggttcacacgcttcgctcggttgccagatagcggtaaaccgctcatcggcaggtgtcacgatatgtgctttgacttcaaagaagtctttcgccacgaagttttcaatctcttcatcgcggcgcaccaccagcccaagcacgggcgtctgcacgcgtcccacggaaagtacgccctgataaccggcattgcgaccgagaatggtatacgcacgggtcatattgatgccgtacagccagtcggcacgcgctcgcgccagcgcagaaacgcacagcggtacaaactcactgttggaacgaagacggtcgatcgcccgctcaaccgcctgcgggttcaggtcgtttatcaagcaacgctgtacctgctggcgcttttccggtgccagttgcagatagtccagcacttcatccaccagcaattgcccttcacgatccgggtccccggcgtgaacgatttcgctggcttcatgcaggaaccgtttgatgacgttaagttgtttggtcacggagggtcggggctgtaattgccacttttccgggacaatcggcaaatccgcaagattccagcgcgcatagcggctgtcgtaggcgtctggctgcgcctgctcaagcaggtgaccgatacaccaggtcaccacctgaccattaccgcactcgataaagccatcgcctttccggtgcggtttgggcaggacatcagcaatggcgcgcgccagactcggtttttcggcaataaacaaccgcattgaattaacgaatctcaaccatggcacgaccgccgcgcgctggcaccagttcgccaattgccgtcagttcaatgccaaactcggcggctgtagctttgacctcattttctgcttccggcatgaccgccagcagcaaaccgccagaagtttgcggatcacacagcagatcgcgcacttcacgcggcatttcacccatcagatgaccgtagctggcaaagttacgttcagtgccgccaggtactgcgcccaacttaatgtactcttcaacaccggggagtttcgggatcgcttcatagtcgacgcgtgcctgcacaccagccccctgacacatttcgctcaagtggcccagcagaccaaagcccgtaacgtcggtcatcgcttttacgccttcgatgttggcaaaggacgcgcctgcgatgttcatccggcacatcacttccgtcgccagtccctgatgttctggtttcaacagactttttttctcagccgtggtaagaacgccgatccccagcggtttcgtcaggaacagtttgcatccggcttgtgcggtactgtttttcttcacccgctcggtcggtacgatccccgttaccgccagaccaaaaatcggctccggcgcatcgatggagtgaccgccagccagcgcaatacccgcctgacgacatgcatagcgtccaccttcggtcacttcgcgggcaatttctggggaaagtttgttaatcggccagccgaggatcgcaatcgccataatcggtttgccccccatcgcgaagatatcgctgatggcgttagtcgccgcaatgcggccaaaatcgaaaggattatcaacgatcggcataaagaagtcggtggtactgataacgctggtgccattgcccagatcgtacaccgccgcatcgtcgcgggtttcattacccacaagcaaattcggatcaacaaacttcgcctgctcactatgcaggatggtttccaacacttttggggaaattttacagccgcaaccagctccgtggctgtattgggtcaaacgaatgctgttctcgctcatggacatctcctgtcaatgcaatccgggtatggtaaccctcattccgtgaagtgataagtgagagtgtctgaattcctgcgcctttgctcacaatccagacagtttcgcgacaattatcagaaataagttacaaacggcgtcgggtccgggacgttaatgctcgtagatgctttcagctgcggcgtaccgaggtagagaaaaccgacaattttatcctgctcacggcaaccgaatgcttcacgcactaccggactttcagttaatgcgccactgcgccagatgccgccaaacccctgggcaactgctgccatttgcatcgccatgaccgcgcatccggcagacatttcctgttcccagcgcgggactttatgattctcttcgcatttcgccaccaccgtgatgatgagcggtgcgcggaacggcgcattacgggctttgtcgatagctttgtcatcactaccggcagcaatcgccccctgttccagtacggcgctgaaacgctcgcgcccttccccttcaatcacaaaaaaatgccacggttgcatggacttatggtccggcgcacgcatacccgcacgcaggatgttttgcagttgttcacccgttggcgcgggttcagccaagcgggaggcgctacggcgattgatcaatagttcgagtgcatccatttgattaactcctgtcgtgatatttattcacaaaattaacacgagagtggattttgttacagcacagtccgcaattcctgctgacaagtaccggttgggtcattacgataaccacatctattgcgcctgtgacaggtgtgaccttaagttgggagaatacatgcgaaccctttggcgatttattgccggattttttaaatggacgtggcgtctgctgaatttcgtccgtgaaatggtacttaacctgttctttattttcctcgtactggttggtgtggggatttggatgcaggtcagtggtggtgatagcaaagaaacggccagtcgtggcgcactgctgctggacatttctggtgtgatcgtcgataaacccgacagttctcagcggtttagtaaattaagccgccagctgcttggtgccagttccgatcgtctgcaggaaaacagtctgtttgatatcgtcaacactattcgccaggcgaaggacgaccgcaatatcaccggtattgtgatggatctgaaaaacttcgcaggcggcgaccaaccgtctatgcagtacatcggcaaagctctgaaagagtttcgtgacagcgggaaaccggtttatgccgttggcgagaactacagccaggggcaatattatctcgccagtttcgccaataaaatttggctgtctccgcaaggcgtggttgatctgcacggctttgccaccaacggtctgtactacaaaagcttgctggataagctgaaagtttccacccatgtgttccgcgtgggtacgtataaatctgccgttgaaccgtttattcgtgatgatatgagtccggcagcccgcgaagctgacagccgctggattggtgagctgtggcaaaactatctgaatactgttgccgctaaccggcagatccctgctgagcaggtattccctggcgcgcaagggttgcttgagggtttaaccaaaaccggtggcgataccgcgaaatatgcactggaaaacaagctggtcgatgcactggcaagcagtgcggaaatcgaaaaagcactgaccaaagaattcggctggagtaagactgataaaaattatcgcgccatcagttattacgattacgcattgaaaacgccggcagataccggtgacagcatcggtgtcgtctttgctaatggcgcaattatggatggcgaggaaactcaggggaatgttggcggtgataccactgcggcacaaatccgcgacgctcgccttgacccgaaagtgaaagcgattgtcctgcgtgttaatagcccaggcggcagcgttaccgcgtctgaagtgattcgcgctgaactggcagcagcccgggcagcgggtaagcctgtggttgtaagcatgggcggcatggcggcatctggtggttactggatttccacgccagctaattacattgtggctaaccccagcaccctgaccggttctatcggtatcttcggcgtgatcaccaccgtagaaaatagtctggatagcattggtgttcatactgatggtgtcagtactagtccgctggcggatgtttctatcaccagggcactgccgccggaagcgcagctgatgatgcagttaagcattgagaatggctataaacgctttatcacgctggttgctgatgcgcgtcatagcacgccggagcagattgataaaattgcccagggccacgtctggaccggtcaggatgcaaaagctaacgggctggtcgatagtctcggggatttcgatgatgcggtcgccaaagcagcagagctggcaaaagtgaaacagtggcatctggaatattacgttgatgaaccgaccttcttcgacaaagtgatggacaacatgtctggttctgtccgggcaatgttgccagatgcgttccaggccatgttacctgcaccgctggccagcgtagcctctaccgttaaaagtgaaagtgacaagctggccgcgtttaatgacccacaaaaccgttatgcgttttgcctgacctgcgccaacatgcgttaagtcttgtactgagtggccgacagatcgtcggccacattattttttacgtcgacgaatcctcttcccgctgtttcgccccatatttccttatccgcatagtatcaggtgcgctccccctgcctcacgtatatacttttgctctttcgatatcattcatatcaatatcatgcaaaagaaaagtatttacgttgcctacacgggcgggaccatcgggatgcagcgttccgagcagggttatataccggtgagtggtcatctacaacgccaactggcgctgatgccggaattccatcgcccggagatgccagatttcaccattcatgaatatacgccgctgatggattctagtgatatgacgccggaagactggcagcatattgctgaagatattaaagcgcactatgacgactatgatggttttgtcattctgcacggcaccgacacgatggcgtataccgcctctgcgctgagcttcatgctcgagaatctcggtaaaccggtcattgtgacagggagtcaaatcccgctggctgagttacgctctgacggacaaattaatctgctgaatgcgttgtacgttgcggcgaattatccgatcaacgaagtaacgctctttttcaataaccgattgtatcgcggcaaccgcactaccaaagcccatgccgatggttttgatgcgtttgcctctccaaaccttcctccgttactggaagcaggtatccatattcgtcgtttgaatacgccacccgccccgcacggtgaaggggaattaatcgttcatccaatcaccccacaaccaattggcgtagtgacgatttatccagggatttctgctgacgtcgtgcgcaattttctgcgccaaccggtgaaagcattgattctgcgctcctatggcgtgggtaatgcgccacaaaacaaagccttcctgcaggaattacaagaagccagcgatcgcggtattgtggtggtcaacctgacacaatgtatgtccggtaaagtgaacatgggtggttatgccaccggtaacgccctcgcccatgccggcgtaattggcggtgcagatatgactgtagaagccacgctaaccaaactgcattacctgcttagccaggaactggatactgaaaccattcgcaaggccatgagccaaaacctgcgcggcgaactgacgccggatgattaaggagactgtaatgccccctcgcgccctgttactggtcgatttacaaaatgatttctgtgctggtggcgcgctcgccgtgccggaaggtgacagtacggtggatgtcgctaaccgcctgattgactggtgccagagccgcggtgaagcggttatcgccagtcaggactggcacccggcgaatcacggcagttttgccagtcagcacggtgtagagccttatacgccaggccaactcgacggtttgccacaaaccttctggccagatcactgtgtgcagaacagtgaaggcgcacaattacatccgttactgcaccaaaaagcgatcgcagcggtgttccataaaggcgaaaatcctttagttgacagttacagtgccttttttgataacggccgtcggcagaaaacctctctcgatgactggttacgcgatcatgaaatcgatgaattgatcgttatgggcctggctactgactattgcgtgaagtttaccgtgctggacgcgttacagttaggttataaggtaaacgtgattaccgatggttgtcgtggcgtgaatatccagccccaggacagtgcgcacgcgtttatggagatgagtgcagctggggcaacgctatatacgctggcagactgggaagagacacaggggtaattttacgctggcctacaattctgtactggcattgtaggccaaataaaacacgtcagtggcacatctggcaattgatgccatcaacgaaagatttaattcacctcagaaatctcttccaagctcaccttccgcgtttcgatgccaaaaatggagagaaccagcgcacagagcaataacataacaccaagtaccataaacaccgtgatgctcccataatgtgttaataatgccgcaacgccatagggcgtgaagactgcgacgatccgtccgacggcattaacgaaaccgctaccgcgcaggcgtaaatgcgttggccaaagctccgggatataaaccgcgctcgcgaagcaaacatacatgtataaaaagaagatcatcaccagtccatagattaaaatcgcccactctgtagtctgaatactatagatatagcctaacacggcaataataataagtaaggtggagccaaataaccgacgaggaaaatgatcaataattaatgccgcaataaatattcctaccggagcgccaatcataataacagcggtcattaatatacttttatcgacatcaatgccggagttaacaaatatggtcggtatccatacggtgatggtataaaggctaatgttcattgcaattaaaacagtaatcgcgactaatgtacgtcgtaacatttcacctttaaacaggagccagaaagtacccttgattactttaaccttgctgttgctctgatagctagtaagcgggggtaaacgaatactcttctctctttcaatttgctgctctacttcacgaagttggcattctgcacctgcgatttgccctttccctgccagccatcgtgggctctcgataaagtatttaccactgagaaaccaggctaacagtatgccaataccacccagcagaaacattattcgccaactaaaaaaagcgataaccaccacgcctatcgccgcagacagcatggggctccagttaccaacaaaactgagccgcgcggaccattttccacgcaccgtcgcggggataaactccgtaaaactggcatagccaaccataatcagcgcccccattcctgttcccatcaggaagcgaaagaagatgagccagtacatatcagggacaaaagcggcccctgttgcagcaataccgacgatgagaagatttatgcgaaacgccctgcgccgcccaaagtagtcaccaataaacccaccagtaagactgccgatgaaataaccaaacattaatgcgctggtaaaggcggcattgaggaaattattactccatccattgcttaccagctttgctaagacgacattaccggagtaactcaaaaaccctgttaataacagactaaagcttataataccaaatatacgataatgaaaccgggccaaaggcaagcggtccagtcttgcgccaatttgatcatattgttccattaggtgcctcggatttgctaaaaaggtagcaattgcggcaaattcacttgccgcatctttatcatcattttatttcaaggcgcaggaacaaataatattgacaacgtgtgcttaaattaccacaccagctggatattattgtctttgcaaaatgctatccactctgcacccggacttttatcagttattatgtaattaatatgactaaaatcagctaactggacaaaagctttgcgatcaaacttagagtgatcaaccaataacgcaacttctgtcgcctgacggatcattgtctttttgatttcagcttccgcttcattagagtccagcgcgccgctgttaatatcaagacctttacaactcattaccatgatatcgacatgatagcgcctgatgatctctttagtaattcttccttgcagactaagtgtatttttgtttagttccccacccgtactaacgactttaatttcactctgagccagaacatgaatcgcttccgcgctgttggttagcaacgtcaggccactacggtcctgtaacaatttgagcaattccattacggtactactggaatcggctgccatggtggttttattgtcgataaagggtagtgccttgcgtgcaataagctgcttctcttcataaaagctactagcgcgcttataaaaatggatattctccgtcaacatcgctgtatttaaaacagcaccaccataggttctggtcaaaaagccttcatcttccagcttctcaagatcgcggcgaatggtttcttcggttacctgaaaaatcccactcaaattactgactgtcacctttttatcgttggcaaccatttgcttaattgcctgaatcctgtcttttgccgccacgattacacccctgtatctttttacatcacattagcgcgattatcgcataaccgatgtttactttcaaaataacctgtttgaatcacagattttcatcacagttttcacagaaacagaggtgaatcgtgttgagtatttaacgctccagggcctctgccatttccctcatcaatgttgcgtctgcatcgcttaagttgatattcagtgccgcgacattttcgcgtacctgttccggtgcagtagccccactaagaatggagattaaatcactctgttttaatatccacgccagtgccagagtgggaattgtgcactgataacgagcacaaagtggctgccactgttcaagcatatcaatcactttcagcatgttttcacgctggaaccagactttatttgcccgagcgccgcccggaacgtaatcacgagtgatggtgccggtcaacaatccctgctctagcggggaataaacctgaaccacaatgccattatcacgacatagtggcagcagttcgttttccattgcccggtcgaggatactgtatttcgcctgaataatatccagttcaccatattgcagatactcgcggatatggtcagcatcgacgttagcagcgcctatagcgcgaattttcccttcagactttaactcattaagcactgcgacagtttcagcgatcggcgtaaaaaatggcggcacgctctgccagtgcgtcatgtagatatcgatgtaatcaatacccagacgttgcaagctcgctgctacctcttcgcggatagattccggggaaaggtttttatacaactgccgatcgccaactttgttgaataaacttccttttcgttcccagacaatgccgcatttggtttctactacaacctgttcacggggcagtttttttaacgcctgaccgacgataacttcactattgccaaagttatatcctggcgcagtatcaatcagattaatgccacaacgatgggcttcaagaatcgtatcaatacatatttgccgatcgagatcgccattccatgcaggaccgccgccaatggcccatgtccccaaccccattcggctaagcgtaatatccgttgtgcctaaaggtatctttttcatttgccttcattatccttcgtattcttccagcaattgttcgaccagctttctgttttttacgccggtggtggcaccgacgcttagaacgctgatagccgccgttgcattggcaaagcgtgcgcattcacgcagatttttgccttctaacagtgccgcaataaaaccactagcaaagttatcgcccgcgccaatggtgtcgatggcggttattcctgcgaccgccggcaccttcatcgtcatgtcaccacgcttgataaagcagccgtctttacccgttttaatcaccaccgtttttacgccgcacgcaagaaagcagtcagcaatttcatccagtgtctctttcccggtgagtaattttgcctcggcaaaattaggaaacagataatcgacataactcaatgcttcgcaaatatcatccagcgtttcattcaaccgcggtttgatcatatcggcacagataatcatctgccgggctttagcttgcgtaaaaatttctgttagcgctttaccatccaatagtggactgttgaaaatactggccagacttaataatttcgcctgagaaaaccgcgcaaaatcaacatcgtcaatattcaatttccacagactgccattacggtttgtgacaaacgtccgctcgccatcctccgtcaccagtccaacgttaatagaggtatctatgctgacgtcctgcttcaggctttgaatatcaatattctctttgcggcaatggtcgagaataaattgccctgcggcatctttaccaatacgactcattaatgctgtgcgatggcccagacgagaaataattgttgcttcatttattgcatcacccccggtggtcattgcgattctttcaagaggataagaatccacatcaaagatatttttactgaccggttgcaatggaatatcaacaatagcggcacctatacaaataacgtcgagattatccatatcattattccgctttgccatcagaaccgaacagtttaattttttccaatgcccgttcttttacagctttacgtacttcacgttctaaatgcaggaaaggctgatcctggttttctttcactgcaaccattgcggcctgacagagctccgtatgaatgttgattttcgcgatacccaagctaattgcagttttaatgtcggcatcactgatcccgcttgcaccgtgcaaaaccagcggaacagaaacggcatcgcgtacgcgtttgacgacctcaaagttcaattgtggctcactcgtataaaccccatgctggttgccgatggcgacagccaaactatcacagcccgtacgttcaacaaattcagccgcctggtcaggatcggtatagtgatagcccgccagcgcttcctcataaacggtttcattaccgacatgccctaattccgcctctaccggaatacccagcggatggaagaaatcgacagcctctttggttaaacgaatattttcttcgaaatcaaacgcggaagcatcacgcattaaactattcataccatgagtccaggcgttatgaataatctccatactccgaccatgatcccaatgagttattaccggcaccgttgctttttgtgccatacttaccatcatgtgagagaaatcttcaaaactggtgttaccgacaaaacctgtaccaaaagaaataataaccggggatttcgcttcttcggctgcgtcgataacgcccatcaacatttctgcattccatacgttaaaatgggcaattgcataatgtttatttgtggcatcgttttcccaatatctgatatctgcgagcatgttctgttctcccgtattaattaatcgctaattttaataacgcctttaataatgtcgcgtttgttgttaacactctcttcaaatgcctgttgtacatcccgataatcgtaaatatgcgtcaccatgcttttcacatcgaatcgcccactagaaatagcttcaatcgtgaccggataacgattggcatagcggaataccgtctggatagtgacttcgcgattgattttgaggaaattgattgcgctatcgccgggtacagtaccaacaatcataattttaccgccgcgcattaccagataaggtgcctgtttaacggtgaccgcagaacccgctgtttcgaaaacaatatctgcgcccatgtcttcggtaaattgctgacagcgtgcaatagtgtcttcttttgcgccgttaataaccactgtcgcaccaagctgttccgccattgccagacgtttttccagcacatcaacgacggcaatttccgttgctcccaggcatttgcacgcttgcaacgtcatcaaaccaatacaacctgctcccagaataattatcttcttacccggtttaacatctgccagcatcgcggcatgcatcccgactgcggcaggctccaccagcgccccttccatcgtgtccatattgtcgggcagtttgtaagtaaagctctccggatgacacagatagtgcgttaatgcgccgcggtagttgggttgtgtcgccataaaatcaacgtccgggcagatgttatatttgccttccagacagtaacgacagtgaccgcaaggaacgccaggttcgatatttacccgatcccccggtttaaatttgcgcacgcggcttcccacagccacaaccgtcccggcgcattcatgacccaggccaatttcttgatttgggtctttaggcggaataaacgggccactttcaaaaccatgtacatcactaccacaaataccgacatattctactttaatcaaaacttcatcttctttaggcactggtatttctgcactaataattttcattgtgcccggcacctgcaatattgctttactatttttcattttgaatccacccgtattatttattggctactgcatcaatacttaaactttcaacggagacacctttggtttcgattccaatggtggcgatagcaattgcgacaataatactaaccgcccccagaagaataaagactcccgtaacgccataactactgagcagcactgcaacggcataaggtgcggcaataccactgattcgccctaccgcattcgccagaccggagccacggagtttggcctctgtcggccagatttcagggacatacactgcgctggcatagcaaacgtacatatagacgaaagtaatcaggaagaaaccaatcaacgttatgagcaacatactggtttgcagactatagatatatccgagcaccgcaatcaggattaatagccccacacccattgttttacgcggaattttatccatcaccagcatggcaataaaaataccaaatggcgcgccaaacatactcatggtatttaaaacaatgctgtcttttaaattaatcccctgggtcatgaatattgttggcaaccagttaattagtgtgtactgcacaacgttcatggcaatcagcacacaagagcctaatatcacgcgtttcagtaatactcctgtcagtaaggcactatacggcaccgcttgtggcgctttaccgtcatcagcaataaccacaggcggcaaaggtttacccgtctggcgtatgacgccttcttctatactccgcatgactttctcggcttcctgataccgtccgcggctttccagccagcgcggggattcaggaaagtagcgccaggccagcgccgtagcgataaggctcaatattgcagggataagcagttgtacccgccagttccactctgcactaatcagcggcgtgagtcccatcgctatcaaactacagagcggataactccagttgccaataaaggaaacccgactactccacgttccacgatttctaccgggcatatattcggtgaaaccagcaaacagcgtaaccagtaaagctcccagcccaactcccatcacaaaacggcaggcaataaggaaatccatattcggactgaaagcaccgacaaccatgctggcaatatgaatggcctcatagaggatgaacgcatttctgcgaccggttttgtcgccaatgatgccgcccaccagcgcaccgagaaacattccggcggtcgtgattgcactgaatgtggctgtggtggaattatctgtccagcccaacgctttcagctgcgcgaggatcaagccaccaacggcattactccagcagacaagcaagccaaacgcgacgatggcaaacatactactatgccagcggcaatccggtaagcgatccagccgtgcaccacaatgcggttttgttatctgttccatgcgataacgttccttcaggagagtggttattcatcaaagtcgtaagtcatgatcactttgattgcggttttatcgaccatcgcatcaaacccttcgcgccattggctcaggccgatacgatgcgtgatcatcggtttgactttgatagcgccgctggctaatagcctgatagcgttacgccaactggtggagtcataggccatatgcccaatgatgcttttgttccaggcggtaatgtcattaatgctgaaatcaagaggtttgaagcccattccaacgcgtaccacttccccgttcgggcggagcatttcgatggcttgtttcagtgcgatattggcaccggagcattcaatcaccagtcccagattgtctttgccacaaatttgctggcagcgcgccaccacatcttcggtagaaccatttactactgccgtcgcacccagttcttttgcaaccgggaagcggaccgccacatcttcttgcagaccaacgacgacgatatttaccgcccccataattcgcgccatttgtacggagaacagcccgagtgggccagtgccgatgacgaccacatcctgaccaggaaggaatttgctttgctgcgcgatggatttgtaggcattacagatagggtcaagtacggctgcgtcctcataatcaacaccatcagggatttcccacaacgcatgacgatgaattttgagaatttcaccaggaaccagacaatatttggaaaaaccaccgccccaggtattattatccagaccaaggtttactttttctgtacaacacagaaaatcaccttgttcacaggccggacaaacaccgcaaacgtgaccgctgttatcgcttacgacgcgttgccccactttccagtctttgactttttcaccaacctgcgcaatacaacctgcgaactcatggccgcggatagagttaaactcatcagaaccgctatcgacattgtagtgcttcatgtctgcgccgcagattgccgcggctttaatttcaatcactacatcttccgggccacacatgggttgtgggacatcaatcatcttgtagccgccaaaggccttgccaaaccgagccagtgctttcattgcgtcatcctctgtgtttagttttgcttagatggccatcatacttacccacatgatttttgaggtcaacattaaatctgtaaaacacagataatgatctgcgttttacaactcagatcacaattacgcagaaaatggctgggtctgttacaggttgatggaaggcggggcgcaaaaagagcaaattcgagagggattaccggccaaataggtctgagacttaagttcaggagaagtcattcaggtgtgaacgggacggcaagagatcggactgggacttagccaggtcatggcgagataattgagatgagtcgtggggtcattgttggctatccccttcatagccgaggcaaaaaggggatgaaccacttacttaaacatggcaataggctttgcactgataccaaaatcttcttttaactgctgtttgctcttcatgaccatctgaccatttgtgtcaattgtcatatgctgtgcttcgatattatggcgggcttgccacagcatcaccagttgcaggcagttctctttttgttcctcggtcaacgcaacgccatcaggccatttccccagttcaacggcggtgctcaaacgctggtatacctcaggcatcatgctgttgataatgtcatcaagattcataatttttccgctcctgtggaataagttgctgaatcgttttttcaaccgttgatttcttcgccgttttcgccatcggtaaagcgtaaagaggcagagttaacacaataacgttcgcccgttggctgcggcccgtcggggaagacatgccccagatgggcatcacagttaccgcaacgaatttctatgcgctgcattccatgactcaagtctttgatataacgaatggattcttcacttaccggttcgtagaaactgggccagccacagccggaatcatacttggtttgggaatgaaacagcggggcatcgcagatcaaacagtgatatacgccgtcacgcttgttatgcagtaaacgacccgtaaatggcggctctgtcccatgattctgcgtcacgtaaaactgcatctcggacaaattttttttcagttcttctgcgctaggtttattagccatttgctcacatctcactttaatcgtgctcacattacgtgactgattctaacaaaacattaacaccaactggcaaaattttgtcctaaacttgatctcgacgaaatggctgcacctaaatcgtgatgaaaatcacatttttatcgtaattgccctttaaaattcggggcgccgaccccatgtggtctcaagcccaaaggaagagtgaggcgagtcagtcgcgtaatgcttaggcacaggattgatttgtcgcaatgattgacacgattccgcttgacgctgcgtaaggtttttgtaattttacaggcaaccttttattcactaacaaatagctggtggaatatatgactatcaaagtaggtatcaacggttttggccgtatcggtcgcattgttttccgtgctgctcagaaacgttctgacatcgagatcgttgcaatcaacgacctgttagacgctgattacatggcatacatgctgaaatatgactccactcacggccgtttcgacggtaccgttgaagtgaaagacggtcatctgatcgttaacggtaaaaaaatccgtgttaccgctgaacgtgatccggctaacctgaaatgggacgaagttggtgttgacgttgtcgctgaagcaactggtctgttcctgactgacgaaactgctcgtaaacacatcaccgctggtgcgaagaaagtggttatgactggtccgtctaaagacaacactccgatgttcgttaaaggcgctaacttcgacaaatatgctggccaggacatcgtttccaacgcttcctgcaccaccaactgcctggctccgctggctaaagttatcaacgataacttcggcatcatcgaaggtctgatgaccaccgttcacgctactaccgctactcagaaaaccgttgatggcccgtctcacaaagactggcgcggcggccgcggcgcttcccagaacatcatcccgtcctctaccggtgctgctaaagctgtaggtaaagtactgccagaactgaatggcaaactgactggtatggcgttccgcgttccgaccccgaacgtatctgtagttgacctgaccgttcgtctggaaaaagctgcaacttacgagcagatcaaagctgccgttaaagctgctgctgaaggcgaaatgaaaggcgttctgggctacaccgaagatgacgtagtatctaccgatttcaacggcgaagtttgcacttccgtgttcgatgctaaagctggtatcgctctgaacgacaacttcgtgaaactggtatcctggtacgacaacgaaaccggttactccaacaaagttctggacctgatcgctcacatctccaaataagttgagatgacactgtgatctaaaaagagcgacttcggtcgctcttttttttacctgataaaatgaagttaaaggactgcgtcatgattaagaaaatttttgcccttccggtcatcgaacaaatctcccctgtcctctcccgtcgtaaactggatgaactggacctcattgtggtcgatcatccccaggtaaaagcctcttttgcattacagggcgcacaccttctcagctggaaacctgcgggtgaagaagaagttctgtggttgagcaacaacacaccgttcaaaaatggcgtcgctattcgcggtggcgtaccggtttgctggccgtggtttggtccggcggcacaacaaggtctgcctgcgcacggttttgcccgcaacctgccgtggacgctgaaaagtcatcatgaagatgctgatggcgtagcgctgacttttgaattgacgcaaagcgaagagacgaaaaaattctggccgcacgactttacgctgttagcgcatttccgcgtgggtaaaacttgtgaaatcgatcttgaaagtcatggcgaatttgaaaccacctctgccctgcatacctactttaacgtgggtgatatcgctaaggtaagcgtcagtgggctgggcgatcgcttcattgataaagtgaatgacgcgaaagaaaatgtactgaccgatggtattcagaccttccctgaccgtaccgatcgcgtgtatctgaatccacaagattgcagcgtgattaatgatgaagcgctgaatcgtattatcgccgtaggccaccagcatcatctgaacgttgtcggctggaacccgggaccggcgcttagtattagcatgggcgatatgccggatgatggctacaaaacatttgtttgtgtagaaacggcttacgctagtgaaacgcaaaaagtgaccaaagagaaacctgcacatctggcgcaatccattcgcgttgcgaaacgttaatttacgttaatgttgtgtgccgggtgcaatgcatccggcacacaacatcacaccatatccagcgcagtttttccttttggtgccggatatgccttatccagcatagctaattccgcactagaaagttcgacctcaagcacagccgcattttgttggacatgggcaatcgtggccgcttttggaatcgccatcacaccctgatgactgatcacccacgccaacaatacttgtgccgcgctgatattgtgagcatgtgcaatttcgttgactaccgcgttttttaacagtccattgcgcaaccgcccggcctgggctaacggactgtaagccatcaccggcatctgctgttgctggcaccaggggagtagatcgtactcaattcctcgactaccgagatggtaaagcacctgattagtggcacactgatttccccccggcagctgccagagttcctgcatatcagcataatcaaggttagaaacgccccagcggcggatttttccctgggcgatcaatttttccatcgctgcgacagtctcttcaaaagcgaaactgccagaccagtgtaataagtaaagatcgagataatcagtattgagacggcgtaaactggcttcgcatgcatttatcgctttttgcccgccagcattccacggatagactttagagacgagaaagaccttctctcgcagaccggttaatgcttccccaaccaccttttcggcaccgccatcggcatacatttcggcggtatcaatgagggttaaaccgagttcaatgcccgcgcgtagtgcagcaacttctgttttgcgctgactggcatcttcgcccatataccatgttccctgccctacggctggcagactgacatcgccactaaattgaatcattttttgttgcattgtttcctcccaggtattgcaccaccgtaatgcaaaacagggcgtgacgccctgtttttatgcacaaaatgccctggaaagatgcattatcagaatttgtaggtgatcccggtagaaatcaggccagtccaggatttatccaccatcgggctgtcagtaacttcatcagacagacgggtgtagcgtgcggtaccgtaaacactccagtcgccgaggaagttgtagctggcgctcagctccaggtaagggctccagctgtcgttcgggttatagccacgcagaccgctgcgagcggactctttgcggcttacgccataatagtattcgttctggttttcgctgttccactgcacaccaatacccggagtcacggtcaggccaccgttggtgtaacgatacaaccaggccatatcccagacgatgccgttgctgttatccagggtatcgccagccagggtggtacgcaggtaaccgtactgggtaaagtgagcataagacagaccagccatcatggtgctcttacggtcatccaggtgacgcatttggtgatcgccactgtctttcgctttgaagtaaagcgggctccagtaagcggtaatactaagtttatccgttgcgtcattccacaggtagtaaccaccacctaagccacggaaccagaagttatcgccttcatagttgattaccggtactgggtaaacatcggtatcgtaatctttatatgggtgttcaacgacacctacgcctgcgcccagggaaaatttaccttcagcgtgcgctacgcctgcagacgttgcgataagcactccaagtgccagaagtttgagtttggtcacaattaatcattccttaaacaaatgtttagcgggcgacaaagtttacccgtcaatacatcgaaacccaacctttttacgttttcattttttaaagtaactgtttaattttcctgacgcggatgacaccgcgcttacagccaaatgaatttagcgttactggcgagcctggtctttacattaattatgcaaaatttatggatgagttgttgatatgccattgaaattaagaaagccgtgcaggcaagttttccatttgccatctacgcttaattttgaaggtgtatcaccgggcacgttgttctcatcgtcgataaaatggcatgagagttgctgtgttttagcaagagacgtcgttcagtttacctcttccgggagcctctactattcatatgaacggctcttaacctgtgctaaaaaacgaaaggacggcataccatgaatatattcgatcactatcgccagcgatatgaagctgccaaggacgaagagttcacactgcaggagtttcttaccacttgtcggcaagatcgcagtgcttatgccaacgcggctgagcggctattgatggctatcggtgagcctgtcatggtcgatacagcccaggaacccagactttctcgactcttttctaaccgggtcattgcacgttatccggcgtttgaagagttttacggcatggaagacgcgattgaacagattgtctcttatctgaaacacgcggctcaggggctggaagagaagaaacaaatcctgtatctgctggggcctgtgggtgggggtaaaagtagccttgctgagcgactgaaaagtttaatgcagctcgtaccgatttatgtattgagcgcgaacggtgagcgtagcccggtcaacgatcatccgttctgtcttttcaatccgcaggaagatgcgcagattctggaaaaagagtatggcattcctcgccgttatctcggcaccatcatgagcccgtgggcggcaaaacgcctgcatgaatttggtggcgatatcactaagttccgggtagtgaaggtctggccgagtattctgcaacaaattgctatcgccaaaacggaacccggcgatgagaacaaccaggacatctccgcgctggttgggaaagtcgatattcgtaaactcgaacactacgcgcagaatgacccggacgcctacggctattccggtgcgctgtgccgcgccaatcaggggatcatggaattcgttgagatgtttaaagcaccgattaaagtgctgcatcccttgttaaccgccactcaggaaggtaactacaacgggacggaaggtatctccgccctgccgttcaacgggattattctcgcacacagcaacgagtccgaatgggtcactttccgtaataacaaaaacaacgaagccttcctcgatcgtgtttacatcgtgaaggtgccgtattgcttgcgcatttccgaagagatcaaaatctacgagaaattgcttaatcacagtgaattgactcacgccccatgcgcccctggcacgctcgaaacactgagtcgtttttccattcttagccgcctgaaagagccagaaaactccagcatttatagtaagatgcgggtttatgatggcgaaagtctgaaagacaccgatcccaaagccaagagctatcaggaatatcgtgactacgccggtgtcgatgaagggatgaacggtctgagcacgcgttttgcgtttaagatcctctcccgcgtgttcaacttcgatcatgtagaagtggcagcaaacccggtccatctgttctacgtcctggaacagcagattgagcgcgagcagttcccacaagagcaggcagaacgctatctggagttcctgaaaggttatctgatcccgaaatatgccgagtttatcggcaaagagatccagacggcctaccttgaatcctattccgaatatgggcaaaacattttcgaccgttatgttacctacgcggatttctggattcaggatcaggagtatcgcgatccggataccgggcagctgtttgaccgcgagtctcttaacgccgagctggagaaaatcgagaaaccggcggggatcagtaatccaaaagatttccgcaacgagattgttaacttcgtactgcgcgccagagcgaataacagcggacgcaatccgaactggaccagctatgaaaaactgcgcacggtcatcgagaagaaaatgttctccaataccgaggagctgttgccggttatcagctttaacgccaaaacgagtaccgacgagcagaagaaacacgacgactttgtcgaccgtatgatggaaaaaggctacacccgtaaacaggtgcgtttactgtgcgaatggtatttgcgcgtacgtaaaagctcttaacaaccctggcccggtacacatgttaccgggcctacaacgacagcgaaccgtgggcctgagaagcggcaacacaggcgtagcatacagttggcaaatgtagtacggggggcatatgacctggtttattgaccggcgtctgaacggcaaaaacaaaagcatggtgaatcgccagcgttttttacgccgttataaagcgcaaattaaacagagcatctccgaggccattaataagcgtagcgtgactgacgtcgacagcggcgaatccgtatccattcccacggaagatattagcgaaccgatgtttcatcaggggcgtggcggtctgcgccaccgcgtgcatccgggcaatgaccatttcgtccagaacgaccgaattgaacgtccccagggtggcggcggaggttccggcagtggtcagggccaggccagccaggatggtgaaggtcaggatgaatttgtctttcagattagcaaagatgagtatcttgatctgctctttgaagatttggccttaccgaatctgaaacaaaaccaacaacgccagctgaccgaatataaaacgcatcgggcgggttataccgctaacggcgttccggccaatatcagcgttgtgcgtagtttgcagaacagtctggcgcgacgcacagccatgacggcaggcaagcggcgggaacttcatgcactggaagagaatttggccatcatcagcaacagtgaacctgcgcaactgctggaagaggaacgtctgcgcaaagaaattgcagaattacgtgccaaaattgaacgcgtcccttttattgacaccttcgatttacgttacaagaactacgagaagcggcccgatccctccagccaggcagtgatgttttgcctgatggacgtttccggtagtatggatcaatccactaaagatatggctaagcgtttttatattctgctgtatctgttcctcagcagaacgtataagaacgtggaagtcgtatacatccgccatcatacccaggcgaaagaagtcgatgaacatgagtttttctacagccaggaaacaggcggcaccattgtttccagcgccctgaaactgatggatgaggtagtgaaagagcgttataacccggcacagtggaatatttacgctgcacaagcaagcgacggcgataactgggccgatgactctccgctttgccatgaaatcctggcgaaaaaattattacctgttgttcgttattacagctatatcgaaattacccgtcgtgcacatcagacattgtggcgagaatatgagcatctgcaatctactttcgacaactttgcgatgcagcacatccgcgaccaggatgatatttatccggtgttccgtgaactgtttcataaacaaaatgcaacagctaaaggctaaaactatcagccaggtcattatcgcctggctgatttttagcttactgtaaattatctcatttattacatacattagcttacaatcgctttaaatatgacagcataacctttacataatttagttccagaaaacaatcattcggaaaaatgattcagagtacacgtatttccatggggttattctttaaatattttttaagcttaacgaaaattgatcctggtcaaaactatatatctctgccaagtataaaatccagcactcacattgctctcctttttatggtttctatgggtacacaaaaattaaaagctcaaagcttttttattttcagtttattgctgacgttaattttattttgcattactaccttatataacgaaaacacaaatgtaaaactcatcccacagatgaattacctgatggttgttgtggctttgtttttccttaacgccgtcatttttcttttcatgttaatgaaatatttcactaacaaacaaattttaccaacactcattttaagccttgcatttttaagtggccttatctatttagttgaaaccattgtaattatccataaaccaattaacggcagtacactgatccagacaaagagcaatgatgtttctattttctatattttccgccaactcagttttatttgtttaaccagcctggcgctcttttgttatggaaaagacaacatccttgacaacaataagaaaaaaacgggaatcctgttgctggcgctgatcccttttttagtttttccccttctggcacacaatctgagcagttataacgctgactattctttgtatgtcgtcgattactgtccggacaaccatactgcgacctggggaatcaactatacaaaaatattggtttgtctgtgggcatttttactgttctttattatcatgcgcacacgattagccagcgaactatggccgttaatagcattattatgtctggcaagcctatgctgcaacttacttctactgactctggatgagtataattatactatctggtatatcagtcgcgggattgaagtttccagtaaactgtttgttgtgtcttttctgatttataacattttcaggagctgcaactctccagcaaactggcagttcatgatgtgctgaccaatatttataatcggcgctactttttcaacagcgtagagagtttattgagccgacctgttgttaaggacttctgtgtcatgctggttgatattaatcagttcaaacgcatcaatgcccaatggggacatcgtgtgggtgataaagtgctggttagtattgtcgatattatccagcaaagcatccgccccgatgatattttagcgcgactggagggtgaggtgtttggcttgctatttaccgaactcaatagtgcccaggcaaaaatcattgcggaacgtatgcgtaaaaatgtcgaactcctgaccggctttagtaacagatatgatgttcctgaacaaatgaccatcagtattggcacggtttttagtacgggtgacacgcgtaatatcagccttgtcatgacggaagcagataaagccttacgcgaagcgaaaagcgaggggggcaacaaagtgattattcatcatatttaagtgcaaaaatattcagagccatgctttttgcgtggcttttgcatacaatttattactattacccctaaatttcccctccccagcggcgcagagatgagtataattagcgcccctgtgccaggccgcaatcgaactttatctggttttctcgtttcactaaccgaaggagatgcgtataaagcttccgatgagcgtttatatgtcaataagcagaacaaaaacagccgttcatgataaccttctgtggttgtttgcttgtaatctcaggagcgtgaaatgactgaaatggctaaaggaagcgtgacgcatcagcggttaatcgctttattaagtcaagaaggtgctgacttccgcgtcgttacccatgaagcggtaggtaaatgtgaagcggtgagtgaaattcgtggcaccgctctaggccagggtgctaaggcactggtatgtaaagtcaaaggcaatggcgtaaatcaacatgttctggcgatcctcgcagccgatcaacaggccgatctgagccaactcgccagccatataggcggattacgcgctagcttggccagcccggcggaagtcgatgaactcacaggctgtgtcttcggcgcgatcccccctttcagcttccatccaaaactcaaactggttgccgaccctctactcttcgaacgatttgatgaaatcgccttcaatgcaggcatgctggataaatccgttattttgaaaaccgcggattatttgcgcattgcgcaaccagaactggtcaatttccgccgcactgcgtaattagccggtccgttcgataagaagaacggacaaaaccagtacaacagcaatggcaaaaaagctactcgtgataatcagtgtctcgacaaacatttgatcgttcatagcatgcccccgggagatagctgttttcacgttattgttagcgtgcacaaatggcagtttgatgacagttcgcctgattttttatgcaaaaaacgtaaagattttctacttccttcctgcagcaagcgtaaagtaagcaggcttattattttttggcaaggaaaccacgatgtttgatgtcactttgctgatcctgctcgggttagctgcgctgggctttatcagtcataacaccactgtcgccgttagtattctggtgttaatcattgtccgcgtcacaccgttaagcaccttttttccgtggattgaaaaacaggggctaagtatcgggataatcattctgacgattggcgttatggcccccatcgccagcgggacgctaccgcccagtaccttgattcacagctttctgaactggaaaagtctggtggcgattgcagtaggcgtgattgtctcctggctgggtgggcgcggcgtgacgttaatgggcagccagccgcaactggtcgccgggctgctggtaggcactgttttaggcgtagcgctgtttcgcggcgtaccggttgggccgcttattgccgcgggtctggttagcctgattgtggggaaacagtaattattgccgcgggtctggtttcgcactttgtggggaaacagtagttaatctcgcaatatatcggcctggcgtttgccccaggcctttcttaaacatagtaataaaggccgttgtactatcataccccagcgtatgagcaactttctgtacagtatcgcctttcactaatccctgaagcgccataatcagctgtaactgctgacgccactggcgaaaactcaaccccgtctcttttactatcagtcgggcaagattgcgttcactcatcgcaaaaaagccagcccattgccccaatgccccccactcgacaggccctttcgccatcatctccaccatcgtgcggattttaggatgagaagaaacgggcaggtgcagctgttgttgtggctgctgagggagttcatcaaacaggacctgaattaatctgcgggtcattggctcagcacgctgagtcgtcgtcctgtttgccagggttaaaattaattcccggcataaggggcttattttcaatgtgcaacatgttgtcggcattgtcactgcgctgggttcgataaacagaaaacagagttcagcattagctgttacttgattgctatgttccaccccgcccggtatccaaaccgcatattgtggcggcaccatccacaaagcattttccaccgtacaggtaattgcaccatgtagcgccagtatcagctgtcctttgcggtgctgatgtacaggactggttaactcatccgttccggcgtgaatacaaaatgcgaccgcggcttcatggtgtcggtcgggttcatagccattgagattcaacctgtgcatcattttgtccgaacttagcgataatttgtcattttagcttgattcaacataacaataaaaacggtaaggtacagcctcgtttgtaacaatgagaagcatatgacctgtagtactagtttaagcggcaaaaacaggattgtccttatcgctggcattctgatgattgccacaacattacgcgtcacctttaccggcgcagcaccgttactggatacgattcgttccgcttacagcctgacgacagcgcaaaccggcttattgaccaccctgccattattggcctttgcgctaatcagtcctttggctgccccggtagcgcgacgttttggtatggaacgtagcctgtttgccgcgttacttttgatctgtgctggtatcgcaattcgctctctccctagcccttacttattatttggcggtacagcggtcattggcggtgggattgcattaggcaatgtcttactgccaggattaattaaacgcgatttccctcattccgtcgccagacttaccggcgcatattccctgacaatgggagctgcagcggcactgggaagcgctatggtcgtgccgctggctttgaacggttttggctggcaaggcgcgttgctcatgctgatgtgttttcctctgctggctctttttttatggctgccacagtggcgaagtcaacaacatgcaaatttgagtaccagccgcgccttacatactcggggtatctggcgtagtccgcttgcctggcaggtcacattgtttcttgggatcaacagtctggtctattacgtgattattggctggcttccggcgatcctcatcagtcacggctatagcgaagcacaggcgggtagtctgcatggtttgctgcaactagccacagcagcacccggtttgctgatcccacttttcttacatcatgtgaaagatcagcgtggtattgcagcgttcgttgccttgatgtgcgcagtgggcgcggttgggctctgctttatgccagcgcacgcgatcacctggactctgcttttcggttttggttccggcgcaacaatgatactggggttgacgttcattggtctgcgggctagttctgcgcatcaggcggcggcactcagcgggatggcacaatccgtcgggtatttgttggcagcctgtgggccgccgctgatgggtaaaatacacgatgctaacggtaactggtctgtaccacttatgggtgttgccatacttagtctactgatggcgattttcggactttgcgccgggagagacaaagaaattcgctaatatccggtgctatagtgacgtaacaaatcatgcgtgaaagggagaacaaacacgatgaatattcagtgcaaacgcgtttatgatccggctgaacagagcgatggttatcgcatactggtcgaccgcctctggccgcgcggtatcaaaaaaaccgatttagcccttgatgagtgggataaagaaatcacgccgagtacggaactgcgcaaagcctttcacggcgaagtcgtcgattatgcaacctttcgcgagcaatatcttgcagaactggcgcaacacgagcaagaaggaaagcggctggcggacatcgccaaaaaacagccgctgaccctgctctacagtgcaaaaaacaccacgcagaaccatgcgctggtgctggccgactggctacgtagcttgtgattttagtacagcatccggcggttatttttcaccagccggatggtcacgccgccacaatgcccattcatcaatcgtttcaccgcccggtaatttgcaattgttgctgaccccttgcgctgtctgcactggaatgagcgtcccgcccttctgctggcaatagacgctcgccggatttgccataccaatctgcggcggtttaggtgcttctggctgagaaggggtactacaaccagccaggaccagcaagcaaggcagaacaaaactgataattttcatttattgatctcacatatttatccaagattagagtatcgcggtatcgttttgttttgcagcactatttttattacattcactcaaaacatattacgtcttgtttcatctttgttgatgatgttttatcatgcctgcaaagattaaataatcagcatttacccgccgtatcctggagttgttccgtgagtgatcagattatcgcccgcgtcagccaatcccttgccaaagaacagagtctggaaagtctggtccgacagcttctggagatgctggaaatggtcactgatatggaaagtacctacctgaccaaagtggatgtcgaagcgcgcctgcagcatattatgtttgcccgtaacagccagaaaatgtacatcccggagaattttaccgtcagctgggattacagcttatgcaaacgcgccattgatgaaaactgctttttcagcgatgaagtccccgaccgttggggtgactgtattgcggcacgcaatcttggcatcaccacatttctgagcacgccaattcacttaccggatggaagtttctatggcacgctttgcgccgccagcagtgagaagcgccagtggagtgaacgcgcggaacaggttttacagttattcgccggactgattgcacaatatattcaaaaagaggcactggttgaacagctgcgcgaagccaatgctgcgctgattgcgcaaagctataccgacagcttaaccgggctaccgaatcggcgggcgatttttgaaaatctgacgacactgttttccctcgcccggcatcttaaccataagataatgatcgcgtttatcgatctggataacttcaaattaatcaatgatcgttttggtcataatagtggcgatctgtttctcattcaggttggcgagcgccttaatacgctccagcaaaatggcgaagttattggtcgtctcggcggtgatgagtttttagttgttagtctaaacaacgagaatgcggatattagcagcctgcgagaacgcattcagcagcaaatacgtggagaatatcacttaggtgatgttgatttgtattatcccggtgccagtcttggcatagtagaagtcgatcctgaaacaaccgatgcagacagtgccctgcatgctgccgatattgcgatgtatcaggagaaaaaacacaaacagaaaacaccttttgtcgcgcatccagcgctacattcctgaggcgtattcacatccttttgattggtgataacatgcgaatcggtattatttttccggttgtaatcttcattacagcggtcgtatttttagcatggttttttattggcggctatgctgccccgggagcataaagatgaaaaaaacaacgattattatgatgggtgtggcgattattgtcgtactcggcactgagctgggatggtggtaacgtcacctctaaaaaatagcaaaggctgcctgtgtgcagcctttgtgcaatttaagcgttaacttttaatcttcctgtagataaatagcacgacaatcgcaccaataacggcaaccacgaagctgccaaaattgaagccatcgactttaccaaagccaaacagcgtgctgatccatccgccgactacggcaccgactatccccagcaggatagtcataaagaatccacctccatctttacctggcatgatccacttcgccagaataccggcaataagcccaaaaataatccaactcagaatgcccattgtttcctcacttatctgttttgcattagcgggttagtcgctgataaaaagcatagcacaacatcgggagggcaagatttgtgacgagcatcacggaggttttttttgcgatggcgcagaaattgcgccatcaacgatcagtgataattaccaaccacaaacatcatgttcgttttccgtgtcataagaacgtacggtattcaccagatcttttatcacttcagccgccacttctggcaccagcaaagtcatcggcgtctctgtttcataatcgacagaaacgccattgctgttattggtgacggtcacggtatacgttgctttgcccatgattcatttcccgttatgaatgactttccgttgttgcgcaccttccatcaggacttcaggagccacgaagaagtcaatgttgaaataagtatcgtcagtcatggcttcaatgttgtgccacttttctggagggaacaccgcaaactgccccgcttcgataaggatcacctgatcaggctctgcactgtgttcatcagcgtagccgagatatttgaccgccccatgcataacggaaaggcgtgggtaaacccccgggcgcgttcctttatcaagatgacgttcgaatattccggcaggtgcagtttgtttattccagaaaggcgtactgcgcgtatgaatataattctgtgggatttgaagcatccttttccctccttcggtgaatgcgctgaaaacggtttattccagccgtttcagggtacgcctgataatttgcattttaaataccatttattggttactttttagcaccatatcagcgaagaatcagggaggattatagatgggaagcccgcgacaacgcgggctgaaagcatcaggattgcagcgtcgccagtcgggcagcgaaacccacgaacatcaaaccaatcagactgttgccaactttagccagtttctttttggtacgtatgtactgcgtgacaaaagcaccagatataatcaggaagctcaaatagcagaaactcaccagttccagcgtcgccgccagaataaagaaactaattcccgtatgtggggcattaacatcgataaactgtacgaaaaagctcacatagaacaaaatggctttcggattagtcaggctcaaaattaacgcgcgtttaaaaatagcaccgtattggggctcatcggatttggcctcgctatttttacccttcagggtcgcgtaaagaattttactccccagatagagcaaataaaacgcaccaagataacgtacaatgttgaataatatcggggtggtcttaattaatgtcgccactccagcccatgccagaaacatcaataccgcatcgccaataaatacaccgcaggccgcaagataaccgcctttcataccgctactgacgctatttttgagtacaaacagggtatttggccctggcaccaacacaataaaaatggccccaaccagataggtccagtaattcagaaccccgtattcagcgaacacattaacctctttaattatctttcgatcatgcgcgattaaaggtgaatatgctaaccaatctgtagcggcttagaaaggagaaaatcaggttttaacctgatatcaacccgataattgaatcattaatcaggcatgctccagactaaaattcgggtagtgctcggcaaaatactggcgtaaaaattctaccgttatccgcactttcgcactcgtcgccagcctactaacataaacggcccagacgttcgctggctggtaatattccggtagcacttgcactaaatgaccactggcaatgttttcgctaacatcccaccaggaacgcagagcaatcccctgcccatcgagacaccactgatggacaatttctccatgattagagctcagtgggccggtgactttaatcgcatgggggccttctttattgcgtaattgccagacaccaaaaggatgatcgcgctctttaatgaccaggcacggcaatgcagaaagatcggttaaatgtttcggcgcgccatgttgcgcaataaattccgggctcgcgcagagaatacggtaattggtcgccagtttgcgggcgattaaattaggggcgatgtcatcgccaatgcgaatatcgagatcgacaccttcattgaccaaatcgaccagtcggtcttccacatcaaaacgtaattccagttgcggatacgccttcgccagcgctaataacgccggagccaccacctgtcgtccaaaaccaaagctgctgataatacgcagcatcccctgcggcacctgacgcacgtcagaaagttcgtccatcatctgaccgacatcctgcaaaatccgctgcgcccattcataaatccgctctccttcttcggtaatggtgacgcggcgggtggtgcggtgtaacaacaccacgtttagcgtttgctccagcaaggcgatgcgcttgctgacgaacgccggactaacgcccagttcttccgccacggcggcaaaaccagcccggcgagccaccagcataaagacgcgcaaatcattcagcagcggtaaattattcatgattcgtgttttatgtttcaccagttacggggattaattccttttcagtcaattataggatggtgatgttgtcaattttgatggtcaggaagtgagaacccaatgatgaaaacgatgcgtattgctgcgatcccgggagacgggattggcaaagaagtccttcctgaagggattcgcgtgttacaggctgccgctgagcgctggggcttcgccttgagttttgagcaaatggagtgggcgagctgcgagtattacagccatcacggtaaaatgatgccggacgactggcatgagcaacttagccgtttcgacgccatctattttggtgccgtcggctggccggataccgttccggaccatattagcttgtggggtagcctgctgaaatttcgtcgtgaattcgaccagtacgtcaacctgcgcccggttcgtctctttcctggcgttccctgcccgctggcgggaaaacagcctggcgacatcgatttttacgtggtcagggaaaacaccgaaggcgaatattccagcctcggcggtagagtgaatgaaggtacagagcatgaagtcgtcattcaggaaagcgtatttacccgccgtggtgtcgatcgcattttgcgttatgccttcgaacttgcgcaaagccgtccacgtaagacactaacttctgccactaaaagcaacggtttagccatcagcatgccgtactgggatgagcgagtggaagcaatggccgagaattacccggagatccgctgggacaagcagcatattgatattctctgcgcgcgttttgtgatgcagccggaacgattcgatgtggtggtggcgtccaatttgtttggcgatatcctttccgatcttggcccggcctgcaccggcaccattggcattgccccatccgccaacctgaatccggaacgcactttcccgagcctcttcgagcctgtccacggttccgcgccggatatctacgggaaaaatattgctaaccctatcgccacgatttgggccggggcaatgatgctcgattttctcggcaatggcgatgagcgtttccagcaagcgcataacggtattctggcagcaattgaagaagtgattgctcacgggccgaaaacacctgatatgaaaggcaatgccaccacgccacaggttgccgacgcgatttgcaaaattattttgcgttaaggtcaaaccagtttatttgaaccgcgtcactgacgcggtttttttattcgttctttgcagtaaataacctgcgtcatttcaccttttattgtttccgtttcgtgttttatggctttccgtattcttaattgtttaatttatgtaacatgcaaattttgttacgcgtacgttaggttccgccgtacaggtattggttttgctggcaatgggactggtgatttatttagccaccagtaaatacggcaatattcgtcttggcgaaggaaaaccggaatacagcacgctctcctggctgtttatgtttatttgtgccggtttaggttcttctacgctttattggggggttgctgaatgggcctattattatcaaacacctggattaaatatcgcaccgcgtagtcaacaggcactcgaatttagcgttccctactctttcttccactggggcatcagcgcctgggcaacttatacgctggccagtttaatcatggcttatcactttcatgtgcggaaaaacaaaggtctgagcctttccggcattattgctgctattaccggcgttcgcccgcaaggcccatggggaaaactggtcgatttgatgttcctgatcgccactgtcggcgcactgaccatttcccttgttgttaccgcagcaacctttacccgtgggctttccgcgctgaccggtttacccgataacttcaccgtgcaggcatttgtgatcctgctttccggcggcattttttgcctaagcagctggattggtatcaacaacggtttgcaacgtctgagcaaaatggttggctggggcgcgttcctgctgccattactggtgctgattgtcggcccaaccgaatttattaccaacagcatcatcaatgccatcggcctgaccacgcaaaacttcctgcaaatgagcttattcaccgatccgcttggcgatggtagttttacccgcaactggaccgttttctactggctgtggtggatcagttacacccctggcgtagcaatgtttgtcacccgcgtttcccgcggtcgtaagattaaagaagttatctggggactgatcctcggcagcaccgtcggttgctggttcttctttggcgtaatggaaagctatgccattcatcagtttatcaatggcgtaatcaacgtcccacaggtgctggaaacactgggcggcgaaacagctgtacagcaagttctgatgagcttgccagccggtaaattgttcctcgccgcatacctgggcgtgatgattattttccttgccagccatatggatgcagtggcctacaccatggcggcgaccagtacgcgtaatctccaggaaggtgacgatcctgaccgtgggctgcgtcttttctggtgcgtggtgatcactctgatcccgctttccatcttgtttaccggtgctagcctggaaacgatgaaaaccaccgtcgtgctcacagcccttcccttcctcgtcattttactggtgaaagtcggcgggtttattcgctggctgaaacaggattacgccgacattccggctcatcaagttgaacattatctcccgcagacaccggttgaagccctggaaaaaacgccagtgctccctgcgggaaccgtattcaaaggcgacaactgagcgccatcatcctaacgataaaggtatccctatgagcaatctgagccctgactttgtactacccgaaaatttttgcgctaacccgcaagaggcgtggaccattcctgcccgtttttataccgatcagaacgcgtttgaacacgaaaaagagaacgtcttcgccaaaagctggatttgcgtcgctcacagcagcgaactggcgaatgccaatgattatgtgacgcgtgagatcattggcgaaagcatcgtgctggtacgcggtcgtgataaggttttgcgcgcgttctataacgtgtgtccgcaccgtggtcatcagttgttgagcggtgaaggaaaagcaaaaaatgtgattacctgcccgtatcacgcatgggcattcaaactcgatggcaacctggcccatgcacgtaactgcgaaaacgtcgccaatttcgatagcgacaaagcgcaactggttccggtgcgtctggaagaatatgccggattcgtcttcatcaacatggaccccaacgccaccagcgtagaagatcaattacccggcctgggcgcgaaagtgctggaagcctgcccggaagtccacgatctgaaactggcggcccgctttaccacccgcacgcctgccaactggaagaacattgtcgataactatctcgagtgctatcactgtggtccggcgcatccaggtttctccgactccgtacaggttgatcgttactggcacaccatgcacggtaactggacgctgcaatacggtttcgccaaaccgtccgaacagagctttaaatttgaagagggtacggatgcggcattccacggtttctggctgtggccgtgcacgatgctgaacgtcaccccgatcaaagggatgatgacggtcatttatgaattcccggtggattctgaaactaccctgcaaaactacgatatttacttcaccaatgaagagttaaccgacgagcaaaaaagcctgattgagtggtatcgcgatgtgttccgtccggaagatttacgtctggttgaaagcgtacagaaagggctgaaaagccgtggctatcgtggtcaggggcgcatcatggccgacagtagcggtagtggcatttccgaacatggtatcgcccatttccataatctgctggcgcaggtgtttaaggactaatgacatcggcggcggtattttccgccgctgggctgatttttgatggagtacagcaatgagtgactatcaaatgtttgaagtacaggtgagccaggttgaaccccttaccgaacaggtgaaacgcttcacgctggtggcaaccgatggcaaaccattacctgcgtttaccggaggaagtcacgtcattgtgcagatgagcgatggtgataaccagtacagcaatgcgtatagtctactgagtagcccgcatgacacctcttgttatcagattgccgttcggctggaggaaaacagccgcggcggttcccgctttttgcatcagcaggtaaaagtgggcgatcggttaacgattagtacgcctaataacctgtttgcgctaattcccagtgccagaaagcatctgtttatcgcgggcggtattggtatcacccctttcctgagccacatggcagagctgcaacacagcgacgtcgactggcagctacattactgcagccgaaatccagaaagttgcgcatttcgtgatgagctagtccagcatccgcaggctgagaaagtccatttgcatcatagtagtaccggaacacgactggaattagcgcgattattggcggatatcgaacctggcacacacgtttatacctgtggccccgaggcgctaattgaagcggtaagaagtgaagctgcgcgtctggacatcgccgccgatacgctgcactttgagcaatttgctatcgaagacaaaaccggcgatgcatttaccctggtgcttgcccgttccggaaaagagtttgtggtgccggaagagatgactattttgcaggttattgaaaataataaagccgcgaaagtggaatgtttatgtcgtgaaggggtatgcggaacctgcgaaacagcaatactggaaggtgaagctgaccatcgggatcaatattttagcgatgaagagcgtgccagccagcaaagtatgttgatctgttgtagccgtgcgaagggtaaacgcctggtgttggatttgtaatttgccgaagccggatgtggcgctgagcgcgcccagtccggcttcggaagattttactgcggatattcctgcaataaattgtgtaatgcttccgccatcagctcaccacgccagccggaaatcagctccggcaaattgttctgcggtttcagtttccagtgccagttcagcagttggttgatttgccgacggcttgccagcaattcggcgctgatcttatgcgtttcgctcacgtcagtaatcaggctcttaatcgctttaaacgctttacgataacccggcatgtccatcaggttaagcatcggctgcggtaaggcatcttccggcaatgtctgcgctttttccaccagcgctagcagcgttttaccgtgaaagcggatttcgctaccggataaacccaggctgtccagttcgcctaaacttcccggcatataacgcgctacgctccacaaatgctcttcacgcacgacaaagttcaccgccagatcgcgctctcgcgccttgcgcagtcgccagtcggctaacagttgcagacaggccagttggcgtgtgcgtaattgccaggcattggtgatatcacgccaggcatcttccggcgcaacgacttcctgacgacgcatttgcatcaggcggcattcatccagcgccgcaggtagccagccggaggcctccgtttctaccataagcttggcggtgatcggtaacagataccagacatccgccgctgcgtattcacactgacgttcggtcagcggtctggccagccagtcggtgcggctttcactcttgtccagcgtaacgccggaatactcttccaccatggaagcgaaaccccaactcatcgggcgtccgcagaaggcagcaaggatttgcgtgtcaatcaagggttgtggtaattcgccaaagacattgaggaacacttccagatcttcactgcctgcatggagaaattttgtgatggacggatcgcgcaggatcgctttcagcggactccagtcggtgatcccgagtggatcgattagcgccagatgctcgccatcgaaaagttgaatcaaccccagctgcgggtaataagtgcgcgtacgaacaaattcagtatccagggctatcgccggaaaggcacggacggcttcacacaaagaagccagcgcatcgtccgtggtaatcatttggtaattcaaattgttttctctttagtgggcgtcaaaaaaaacgccggattaaccggcgtctgacgactgacttaacgctcaggctttattgtccactttgccgcgcgcttcgtcacgtaattctcgtcgcaaaatttttccgacgttagatttcggtaactcatcacgaaactccaccagcttcggtactttgtatcccgtgagctgacggcggcaaaaagtcaccagactctcttcggtaaggcttggatcttttttcactacgaagattttcaccgcttcaccactggagccggaaggtacgccaacagccgcgacttcctgtacgccaggatgctgcatgacgacatcttcaatctcgttgggatagacgttaaaaccggaaaccagaatcatgtcttttttacgatcgacaatgcgcaggaatccttcttcatccattaccgcgatgtcgccggtgtgtaaccagccatttttgatgatttcatcggtagcatcgggacgctgccagtaacccagcatcacctgcggtcctttgacacaaagctcacccggttgacctggtggtacttcattatcatcatcatccaccagtttggcttccgtgctcggcaccggcaaaccgatgctaccactatgataatcaatatcatatgggttaacgctgaccagcggcgcacactcggtaaggccatagccttccagcagatactgtccggtcagtttcacccaacgctctgccaccacttgctgcactggcatcccaccgcctgcggaaagatgcagactggagaaatccagctgctggaactctttattgttcagcaacgcattgaacaaggtgttaacgcccgtgatagcggtaaacggatatttcgctaactcttttaccaaccctggaatatcgcgcgggttagtgataagcaggttctgcccacccagttcgataaacagcaggcagttaatggtcagggcaaaaatgtgatacagcggcagcgccgtcaccaccagctctttgcccggatgcaacagcggaccataggtcgcgttaacctgttccaggttcgccagcatattgcggtgagtcagcatcgcgcctttcgccacaccagtggtgccgccggtgtattgcagaaaagctaaatcttccggcaccagttcgggtttgacgtactgcatccggtagccgttatgcagtgcgctacgaaaactaatggcatctggcagatggtatttcggcaccaaacgcttgatgtatttaacaacgaaattgactaccgtgccttttgccgtagatagctgatcgcccatacgggtcagaattacgtgctgaacggcggttttatcaaccactttttccagtgtgtgagcaaagttagacacgataacaatcgcgcttgcgccgctatcgttaagctgatgctcaagctcacgcggggtatacaacgggttaacgtttacgacgatcatcccggcacgcaaaatgccaaacagcgccaccggatattgcaataaattaggcatcatcaacgcaacgcgatcgcctttcttcagccccaacccttgttgcaaataagcggcaaacgcgcgactgcgttcttccagcttgcggaaggtcattacctcccccatattcacaaacgcaggttgatcggcgtagcgcgcgacgctctgctcaaacatatctaccagagattgataacggtcagggttgatctccgtcggaacgtccgcgggataacggttaagccaaaccttcttcaattcttcacctctaaaatgcgtgttcgtcgtcatcgcaaccccaaatgatatacatgccgttaacataatattaactcatcataccagcttgataattacccaacgaaaaggttgcgaagcgcgtcactatttatttttatctttaccgtaagaatgcagaaacagcggaccagccgctgtttctttttctttaaaaacaagcaattattcagttacaactgtttgtactctcgcggggccgggattataccagccccatccgccgtagccatagggccagccacgaccgccataaaaccatggatcaatcggctgaggcggcataatcacctgctgggttaaatgccaacgtttgtaacccgttacttgcatcaccataaatttatagggcgtattgccgattttgccgtcaaccgcaccagtgattggcccgactaccgtaaccagttgtccacggaaatccaccgggtccagaaaaccgttcacatcggcataaatgcgaccgcgagaaggttctcccagcgtcggtctggctccgctgtccagcggtacggtagcaatttccaggcgagttttcccttgctggttttgtaccgcaaccactttgccaccaaagcgtgcctcctgaccaacgtacagctgcggcgcactcatcacccgaactaaatcttgttgcggcgtgggactgctgcctttaatggcgtccggcacagtgacacaaccgctcagcattagcgcaaacgtacctgccagtatgcctttgataacattcttttgaaccgccatggtgcgactcctttttttctcagggcatactcttaagattcattctttgcccggaagtttcttccatgcgacgttgttacgtaaataaaccggttcggcatgttccaccgccaccgttttaccctcagcaaacatctgacacgcaatcggcagcatatcttcagcagcaggcagtaacacttcgccatcgcgcaaaaccagcccgctctctttaccgagatccggccaagcttgccagcccgtccctaccgtcacccattcgccggaaagctgttgcattcgttcatggacgatttcgggtttgagtacggcttcggtttcttcaccgtgccagataccgttttcatcacgctgatattcggcccagtaaacttcgcccattcgcgcgtcaatggctgccagcacgcgggttgcgccgtttttgcgccacgccccttgcgccatcgtcattagcgtggagacgccaatcatcggtaattccgcgccaagcgccagcccttgcgcgatgccaataccaatgcgcacgccagtaaagctaccggggccgcgcccgtaagccagagcgttaatatcagtcagggaagttccgctggtggtcaggatatcctgcaccatcggtaagattcgttgagtatgttcacgagggcaaagctcaaaatgagcgttgacagtaccgtcgttccacagggcgacagagcaggcctctgtcgcggtatcgatagccagaattcgcatgggtcttcgtgcttagatcaataaaaaggcgcgcatcataccatactccgtaacaaattacctggaggatggtatcgcaaggaaacgaaccgcacgggcaatgtcacgggtgcgtggcgcgggcggcagactggcgagaaacgtcgcgccgtaaggacgcatcaccagccgattgtcacaaatcaccagcacgccacgatcgtcggcgtcgcgaatcagtcgccctaccccctgtttgagagtaatgacggcatctggtagttgcacttcatcgaacgggtcgccaccgcgcaaacgacaatcttccatgcgcgcttttaacagtggatcatccgggctggtaaacggcaatttgtcgataattaccaaactcaatgtatcgccacgcacgtccaccccttcccagaaactgctggttgccacaagaagcgcattaccggcgctgacaaattgctgcaacagttgccctttgctggtttccccctgcaacaatacaggaagcgtcatggtagcgcggaactgctcggccagatcgcgcatcatggcgtggctggtacaaagcataaaacaacgaccgttgttagcttcgatgatcggtcgcagcattgccgctaactggcgagcagaacctggctggttggtttgcggcagattgcgcagcacacagagtaacgcctggcggctgtaatcaaatgggctgggcaacagcaagctctcggcctgttcgatgccaagccggctggtgaaatgatgcagatcgtcgttcacgctcagcgttgcactggtgaagatccagctaccgggtttttgcgccattaactctttgaatttatccgccacgctgagcggcgtgagagccagagtaaaatggcggctagtgcattcgtaccagtagctgtagcccggctgattgatctcttttagccgcttcagccgtgtgcgatacaacgtggcgcgctcaaatgccgcatccagcaaggcggaacgccccagactcagtttcgccacgtcataacaaagttccagggtgtcatcgagcagtaaaaatgcccgctgaatttgcggattagctaacagctcacgcaggttaccgcgataacctggctcaccgagttgcagacgaaaatcctgcgcactctgggcaagacgatcagcgcacttttgtaactgctgggtgtcttttaattcggtgcggtaggcgatggtgatgtcttttgccaggtcgagcagttgtcgactggagagactctgaccaaaatactggctggcaatgtccggtagctggtgggcttcgtcgaagatcatgacgtccgcttccgggatcagttcgccaaatccactctctttaaccaccatatccgccagaaagagatgatggtttaccaccaccacatcggcgtccatcgcttttttacgtgctttgaccacaaagcaatctttatacatcgggcagtcgctgccaagacagttgtcgttggtgctggtgaccagcggccacgcctgactatcttccgccacgctgacgcaggtgctgatatcaccatcgactgtttgattagaccaggagcgcagcaggatcacatcgcttaagatttgtaccggcagatcgccccccgccagcgcctgctgttcgagacgttcgaggcagaggtagttactgcgccctttcagcagcgccacgttgcccgtatatttcaatgccttactgactgttggcaaatcgcggctgtagagctgatcctgcaacgctttactgccggtgctgataatgactttctttttcgcccgcagcgcaggagccaggtaagcgtaggttttgcccgtaccggttcctgcttccaccaccagcggctggcctttttctatcgcctgggtgacggctaccgccatctgtcgctgtggttctcgcggcttaaagcctggtatcgctttcgccagctgaccgtctggtgcaaaatcgtccgtcacactaccccctgttgatttgaacagggattatgtcaggatgagggcgctttcgccagttgaagtggtgacggcgacctcacattgtggcagtctttgcagcacgaaaatggaagtataatgaggacaaaatgatgactatcgttcgtatcgatgctgaagcccgctggtctgatgtagtaatccacaacaacacgctctactacactggtgtaccggaaaacctcgacgccgatgcctttgagcaaaccgccaacacgctggcacagattgacgccgtgctggaaaaacagggcagcaataaaagcagcattctggatgccaccattttcctggccgataaaaacgacttcgcggcgatgaataaagcgtgggatgcttgggttgtcgcgggtcatgcgccggtgcgctgcacggtacaagcgggtttgatgaacccgaagtataaagttgaaattaagattgtggctgcggtgtaagctttatcgaagcaaaataagtcagacgataatttatcgataatactggtcggttttacataaatcgaccagagaataagatattactgttgatgcttctgctaattcattatttatatttataatttcaattttatctataaaactaactatataaataaacataaacatgccgttgtgttcgccctttgattagcaactctggttttctttcttagctgaacaatctggttatagcgtgcggactgaccgttaaatttctccatcttactggataacacaccatgagctgctacctttaaaacacctgaatgtcaacaggttaactcgtgccatatcgttataatccctttgatattagatgcaaattaaggtcatatatagccttatcgataacatggttaattttaaggataagaatatgcctgctgtaatagataaagccctggatttcattggtgccatggatgtaagtgcgccaacaccaagtagcatgaatgaaagcacggcgaagggaatctttaaatatttaaaagaactgggagtacccgcgagtgccgctgatattacggcgcgagctgaccaggaaggctggaaccctgggttcacggaaaaaatggttggatgggcaaaaaaaatggagacaggtgaacgttctgtgattaaaaatcctgaatactttagtacatatatgcaggaagaactaaaagcactggtctgagttaaatttatatcagcataaatgggtcaggacgcttttaatcacatataaaaagcgtcctttttctcacaatcaaatgatcatcggcttctataacgaaatcgatacggattagtgtgttactcgtcttcatcctcaaaacgcgccacgattcgctcgccggagtggttggcacgcagctcttctgccaccagcgcgattgcctggccgctgctcatcccttgtgccatcagttcctggatccgctcgacagctttttgctgctgttcatgggtgagactaggtaaacctgcaaacattgttaactcctgctaaattgttggcgctaattatttcatgctacccggcacatagccagtagagtcaggactgatgaagacgttatctcccgctgtgattactttactctggcgtcaggacgccgctgaattttatttctcccgcttaagccacctgccgtgggcgatgcttttacactccggctatgccgatcatccgtatagccgctttgatattgtggtcgccgagccgatttgcactttaaccactttcggtaaagaaaccgttgttagtgaaagcgaaaaacgcacaacgaccactgatgacccgctacaggtgctccagcaggtgctggatcgcgcagacattcgcccaacgcataacgaagatttgccatttcagggcggcgcactggggttgtttggctacgatctgggccgccgttttgagagtctgccagaaattgcggaacaagatatcgttctgccggatatggcagtgggtatctacgattgggcgctcattgtcgaccaccagcgtcatacagtttctttgctgagtcataatgatgtcaatgcccgtcgggcctggctggaaagccagcaattcagcccgcaggaagatttcacgctcacttccgactggcaatccaatatgacccgcgagcagtacggcgaaaaatttcgccaggtacaggaatatctgcacagcggtgattgctatcaggtgaatctcgcccaacgttttcatgcgacctattctggcgatgaatggcaggcattccttcagcttaatcaggccaaccgcgcgccatttagcgcttttttacgtcttgaacagggtgcaattttaagccttagcccagagcggtttattctttgtgataatagtgaaatccagacccgcccgattaaaggcacgctaccacgcctgcccgatcctcaggaagatagcaaacaagcagtaaaactggcgaacagtgcgaaagatcgtgccgaaaatctgatgattgtcgatttaatgcgtaatgatatcggtcgtgttgccgtagcaggtagcgtaaaagtaccagagctgttcgtggtggaacccttccctgccgtgcatcatctggtcagcaccataacggcgcaactaccagaacagttacacgccagcgatctgctgcgcgcagcttttcctggtggcagtataaccggggctccgaaagtacgggctatggaaattatcgacgaactggaaccgcagcgacgcaatgcctggtgcggcagcattggctatttgagcttttgcggcaacatggataccagtattactatccgcacgctgactgccattaacggacaaattttctgctctgcgggcggtggaattgtcgccgatagccaggaagaagcggaatatcaggaaacttttgataaagttaatcgtatcctgaagcaactggagaagtaagacgtggaataccgtagcctgacgcttgatgattttttaagccgctttcaacttttgcgcccgcaaattaaccgggaaaccctaaatcatcgtcaggctgctgtgttaatccccatcgtccgtcgaccgcaaccggggttgttgctgactcagcgtagcattcatctgcgtaaacacgctggacaagtggcattccctggaggtgcagtcgatgacacggacgcaagtgctatcgccgccgcgctgcgcgaagctgaagaagaggtcgctataccgccttccgccgttgaagttatcggcgtgctgccgcccgtcgatagcgtcactggctaccaggtaaccccagtggtcggcattatcccgcccgatctgccgtatcgcgccagtgaagatgaagtcagcgcggtgtttgaaatgccgctcgcccaggcattacatctgggtcgttatcaccctttagatatctaccgccgtggtgatagtcatcgggtatggctgtcctggtacgaacagtattttgtatggggaatgaccgcaggcataattcgtgagctggcgctgcaaattggtgtgaaaccctgactatacttatctttacatctacaaaacactacttgagacaatcatcgcaatattagttaaatcgcggtttttgattagtttaattcatgtgaatagttaagccagtcgccgcgttccctcttacactatgcgctgttattagttcgttactggaagtccagtcaccttgtcaggagtattatcgtgattagtctattcgacatgtttaaggtggggattggtcccagttcttcccataccgtagggcctatgaaggcaggtaaacagttcgtcgatgatctggtcgaaaaaggcttactggatagcgttactcgcgttgccgtggacgtttatggtagtctgagcctgacgggtaaaggccaccacaccgatatcgccattattatgggtcttgcaggtaacgaacctgccaccgtggatatcgacagtattcccggttttattcgcgacgtagaagagcgcgaacgtctgctgctggcacagggacggcatgaagtggatttcccgcgcgacaacgggatgcgttttcataacggcaacctgccgctgcatgaaaacggtatgcaaatccacgcctataacggcgatgaagtcgtctacagcaaaacttattattccatcggcggcggttttatcgtcgatgaagaacactttggtcaggatgctgccaacgaagtaagcgtgccgtatccgttcaaatctgccaccgaactgctcgcgtactgtaatgaaaccggctatagcctgtctggtctcgctatgcagaacgaactggcgctgcacagcaagaaagagatcgacgagtatttcgcgcatgtctggcaaaccatgcaggcatgtatcgatcgcgggatgaacaccgaaggtgtactgccaggcccgctgcgcgtgccacgtcgtgcgtctgccctgcgccggatgctggtttccagcgataaactgtctaacgatccgatgaatgtcattgactgggtaaacatgtttgcgctggcagttaacgaagaaaacgccgccggtggtcgtgtggtaactgcgccaaccaacggtgcctgcggtatcgttccggcagtgctggcttactatgaccactttattgaaagcgtcagcccggacatctatacccgttactttatggcagcgggcgcgattggtgcattgtataaaatgaacgcctctatttccggtgcggaagttggttgccagggcgaagtgggtgttgcctgtagtatggctgctgcgggtcttgcagaactgctgggcggtagcccggaacaggtttgcgtggcggcggaaattggcatggaacacaaccttggtttaacctgcgacccggttgcagggcaggttcaggtgccgtgcattgagcgtaatgccattgcctctgtgaaggcgattaacgccgcgcggatggctctgcgccgcaccagtgcaccgcgcgtcagcctggataaggtcatcgaaacgatgtacgaaaccggtaaggatatgaacgccaaataccgcgaaaccagtcgcggtggtctggcaatcaaagtccagtgtgactaatacttcttactcgcccatctgcaacggatgggcgaatttatacccgctttctcgtctgctgtaatattccccactacacttccactgttgcgtcaggcgtttgtcgccatacgcttacagggtggcccgcatgcaaaaagcacaacggatcattaaaacctatcgtcgtaatcgaatgattgtttgtacgatttgcgcactcgttacgctcgctagcaccctgagcgtgcgatttattagtcagcgtaacttaaatcaacaacgggtagtacaattcgccaatcacgctgtagaggaattagataaagtactgcttcccctacaggcaggtagcgaagtcttgcttccgctgattggtctgccctgctctgtcgcccatttgccattacgtaaacaggcggcaaaactccaaactgtgcgatccattggcctggtgcaagacggcacactttattgctccagcatttttggttatcgcaatgtgcccgtcgtggacattctggctgaacttcctgcaccgcaaccacttttacgcctgacgatcgaccgtgccctgattaaaggcagtccggttttgattcaatggacgcctgcagcgggcagtagcaatgctggggtcatggagatgattaacatcgacttactgacggcaatgctgcttgagccacaactgccgcaaatcagtagcgccagcctgacggtggacaaacggcatttgctctatggtaatgggctggtagattcccttccgcaacctgaagacaatgaaaactatcaggtttctagccaacgctttccttttaccattaacgttaatggtccgggggctacggcgctggcatggcactatcttccaacacaattaccgctggcggtgctgctaagtttactggtgggctacatcgcctggctggcgaccgcttaccgaatgagcttttcccgcgaaatcaatctgggcctggcgcaacatgagttcgaattgttctgtcagcctttgcttaatgcgcgcagccagcaatgtattggtgtagagattttgctgcgctggaacaatccgcgtcagggctggattagtccggatgtgtttattcctatcgcggaagaacatcatttaattgtgccactgacccgctatgtgatggcagaaaccattcgtcagcgccatgttttcccgatgagtagtcagtttcatgttggcattaacgtcgcacccagccattttcgccgtggtgtgctgataaaagatctcaatcagtactggtttagcgctcacccgattcagcaactgatcctcgaaatcaccgaacgcgatgccttactggatgttgattatcggattgcccgcgagctgcatcgtaaaaacgtcaaactggcgattgatgacttcggcaccggcaacagcagcttttcctggcttgaaacattacgtcctgacgtgctgaaaattgataagagttttaccgcagctataggttctgacgcggttaacagcacggtgaccgatatcatcatcgcgctggggcaaagactgaatattgaactggtggcggagggcgtggaaacgcaagaacaggcgaagtatttgcgccgtcatggcgtgcatattttgcaagggtatttgtacgcacagccgatgccgctacgtgattttcccaaatggctggcgggcagccaaccgccgcccgcccggcataatggacatatcacgcccattatgccgttacgttaacgcttactcatcttcatcgtgcgccggttgctctttaacaatgcgaaccagatcaacacgataatcattggcttcaatgatggtgatatgcagtggccctacatcaatcacatcgcccacacggggaatgtgaccatttgcgctgatcacgaggcccgcgaccgtcgcgatatcatcgtcatcggcaaggtgctcaacatcaagcgcctgctgcaaggcatgcaaatctgtaccgccttttaccagccagccgtcaccatcagtaatgatttccggcgtttcgtcagcgtccgggaattcacccgcaatggcttccagcacatccagcggcgtgaccagaccttgtaccacaccaaactcgttggtcacgataacaaagctcccgcgagcacgacgcagcacgcccaacaggttgatcggatcgagggtttccgggacgataatcgccggagacgcgctagcaatcgccgccacatcaacgccctcttccagcgccaccagcagttctttagcacgtacaataccgatgatttcatccagttcaccgcgacataccgggaacagactgtgcggactagagagcagttgctcgcggatttcatcgaccccgagattagcgtcaacccagcttatttcaccgcgcggcgtcatgatcccgcgcagagaacggctcgccagcgtcagtacgccgttaatcatgtaacgttcttcttcggcaaatgcaccttccgggatcggcatcggcatcgggttatcggcatcgtgctgaacattggcctgacgtttcccgcccatcaaacgcaggatggcatcggcagtacgcgctcgcagcggcaaagtgctctggtggcgaataaagttgcgacgcgcaatctggttaaacacttcgatgatgatgctgaagccaatcgcggcatacaggtaacctttcggaatgtggaaaccgaaaccttctgccaccagactcagaccaatcattaacaggaagctcagacagagcaccaccaccgtggggtgctggttaacgaatcgcgtcagcggtttggatgccagcaacataaccgccatcgcaatcactaccgccgccatcatcaccggcagatggttaaccatccctactgcagtaattaccgcatccaagctgaagacggcgtcaaggatgacaatctgtgtgacgaccacccagaaactggcgtagcctttaccgtggccggaatcatgatcgcggttttccagccgttcatgcagttcggttgttgctttgaacagcaagaatatccccccgaacaacataatcaggtcgcgtccggagaaggagaaatccatgacggtaaatagcggtttggtcagcgtgaccatccaactaatcaggctcagcagccccagacgcataatcagcgccagacttaaccccagcaaacgcgctttatcgcgttgttttggcggcagtttgtcagcaagaatggcgatgaagaccaggttatcgatacccagcacaatttcgagaacaacaagcgtgagtagccccgcccaaatactggggtccattaagaattccatgacaagctcctgcttaaggaatagctattcgacgccagaaataatgcaggcgtaacgacaaaatgcaaacgaaaggtgcggcatagagtgccagaaaggcaggcgttaaaaggcctgatgctgaaatgacgtcggtgacgatccatactgcgggctactgccctatactccatggttgttaaacgggagttaaacatatcagagacgcctctgatttggcaaagatttaccttcctttgcaaacgaatgtgacaaggatattttacctttcgaaatttctgctaatcgaaagttaaattacggatcttcatcacataaaataattttttcgatatctaaaataaatcgcgaaacgcaggggtttttggttgtagcccttatctgaatcgattcgattgtggacgacgattcaaaaatacatctggcacgttgaggtgttaacgataataaaggaggtagcaagtgaccattgctattgttataggcacacatggttgggctgcagagcagttgcttaaaacggcagaaatgctgttaggcgagcaggaaaacgtcggctggatcgatttcgttccaggtgaaaatgccgaaacgctgattgaaaagtacaacgctcagttggcaaaactcgacaccactaaaggcgtgctgtttctcgttgatacatggggaggcagcccgttcaatgctgccagccgcattgtcgtcgacaaagagcattatgaagtcattgcaggcgttaacattccaatgctcgtggaaacgttaatggcccgtgatgatgacccaagctttgatgaactggtggcactggcagtagaaacaggccgtgaaggcgtgaaagcactgaaagccaaaccggttgaaaaagccgcgccagcacccgctgccgcagcaccaaaagcggctccaactccggcaaaaccaatggggccaaacgactacatggttattggccttgcgcgtatcgacgaccgtctgattcacggtcaggtcgccacccgctggaccaaagaaaccaatgtctcccgtattattgttgttagtgatgaagtggctgcggataccgttcgtaagacactgctcacccaggttgcacctccgggcgtaacagcacacgtagttgatgttgccaaaatgattcgcgtctacaacaacccgaaatatgctggcgaacgcgtaatgctgttatttaccaacccaacagatgtagagcgtctcgttgaaggcggcgtgaaaatcacctctgttaacgtcggtggtatggcattccgtcagggtaaaacccaggtgaataacgcggttagcgttgatgaaaaagatatcgaggcgttcaagaaactgaatgcgcgcggtattgagctggaagtccgtaaggtttccaccgatccgaaactgaaaatgatggatctgatcagcaaaatcgataagtaacgtattgtgttgattatcactcagttttcacacttaagtcttacgtaaacaggagaagtacaatggagattaccactcttcaaattgtgctggtatttatcgtagcctgtatcgcaggtatgggaagtatcctcgatgaatttcagtttcaccgtccgctaatcgcgtgtaccctggtgggtatcgttcttggggatatgaaaaccggtattattatcggtggtacgctggaaatgatcgcgctgggctggatgaacatcggtgctgcagttgcgcctgacgccgctctggcttctatcatttctaccattctggttatcgcaggtcatcagagcattggtgcaggtatcgcactggcaatccctctggccgctgcgggccaggtactgaccatcatcgttcgtactattaccgttgctttccagcacgctgcggataaggctgctgataacggcaacctgacagcgatttcctggatccacgtttcttctctgttcctgcaagcaatgcgtgtggctattccggccgtcatcgttgcgctgtctgttggtaccagcgaagtacagaacatgctgaatgcgattccggaagtggtgaccaatggtctgaatatcgccggtggcatgatcgtggtggttggttatgcgatggttatcaacatgatgcgtgctggctacctgatgccgttcttctacctcggcttcgtaaccgcagcattcaccaactttaacctggttgctctgggtgtgattggtactgttatggcagtgctctacatccaacttagcccgaaatacaaccgcgtagccggtgcgcctgctcaggcagctggtaacaacgatctcgataacgaactggactaacaggtgagcgaaatggttgatacaactcaaactaccaccgagaaaaaactcactcaaagtgatattcgtggcgtcttcctgcgttctaacctcttccagggtagttggaacttcgaacgtatgcaggcactgggtttctgcttctctatggtaccggcaattcgtcgcctctaccctgagaacaacgaagctcgtaaacaagctattcgccgtcacctggagttctttaacacccagccgttcgtggctgcgccgattctcggcgtaaccctggcgctggaagaacagcgtgctaatggcgcagagatcgacgacggtgctatcaacggtatcaaagtcggtttgatggggccactggctggtgtaggcgacccgatcttctggggaaccgtacgtccggtatttgcagcactgggtgccggtatcgcgatgagcggcagcctgttaggtccgctgctgttcttcatcctgtttaacctggtgcgtctggcaacccgttactacggcgtagcgtatggttactccaaaggtatcgatatcgttaaagatatgggtggtggcttcctgcaaaaactgacggaaggggcgtctatcctcggcctgtttgtcatgggggcattggttaacaagtggacacatgtcaacatcccgctggttgtctctcgcattactgaccagacgggcaaagaacacgttactactgtccagactattctggaccagttaatgccaggcctggtaccactgctgctgacctttgcttgtatgtggctactgcgcaaaaaagttaacccgctgtggatcatcgttggcttcttcgtcatcggtatcgctggttacgcttgcggcctgctgggactgtaagactgttgtacactaccggggccttttggccccgtttttttatctggaggattaatgacaatcacggacctggtactgattcttttcatcgccgcactcctggccttcgcgatctacgatcagttcatcatgccccgccgtaacggccccaccctgctggcaattcctttgctccggcgtggtcgcatcgatagcgttatcttcgtcggattgattgtcattcttatctataacaacgtcacgaatcatggtgcgttaataacgacatggttattaagcgcactggctctgatgggtttttatatattctggatccgcgttccgaagatcatctttaaacaaaaaggttttttcttcgccaatgtctggattgaatatagccgaatcaaagcgatgaacttgagcgaagatggcgtgttggtgatgcaattagaacagcgtcggctgttaatccgcgttcgaaatatcgacgatctggaaaaaatttataagcttctcgttagtactcaataagttatgaatttagccaaagctatgtttagtgtatttttaataatcagacatagcttaggctatattacctcttcccttatttgttatttattttaacgtttcattgatatataaatccaaatgaaaatcgttatcaataaagcaatgaaataatatattccaacagttgttttatattctcaaaatatgttaaggttgcgccctcatttggggagtagccgatttccagattccggaaatgtacgtgtcaacatactcgttgcaaaacgtggcacgtacggactgaatactttcagtcaggcgagaccatatgcacatcaatcgctatgcctgcatgaacgcgaaaaccatcacggcttgttgttcatgtatgcatgtttgctgggggcgatgatgtgttttatggataccccggtcaggacattgtcatgaatatcactgctactgttcttcttgcgtttggtatgagcatggatgcatttgctgcaagtatcggtaaaggtgccaccctccataaaccgaaattttctgaagcattgcgaaccggccttatttttggtgccgtcgaaaccctgacgccgctgatcggctggggaatgggcatgttagccagccggtttgtccttgaatggaaccactggattgcgtttgtgctgctgatattcctcggcgggcgaatgattattgagggttttcgtggcgcagatgatgaagatgaagagccgcgccgtcgacacggtttctggctactggtaaccaccgcgattgccaccagcctggatgccatggctgtgggtgttggtcttgctttcctgcaggtcaacattatcgcgaccgcattggccattggttgtgcaaccttgattatgagtacattagggatgatggttggtcgctttatcggcagtattattgggaaaaaagcggaaattctcggcgggctggtgctgatcggcatcggcgtccagatcctctggacgcacttccacggttaataagaacgctgccagaggtgaatattaaagtccgtctggcagtcgaacacttcttttgctgccagtgtttgccagacttctggcttcgcacgccaggcaaacggcgtcatctgcaataatgcgacggcttcatcaccgcgaagacgcatcggataacacaactccgcactctgctgtaatgtaaaaccttccagttgttctgcatgaggtgcatgaagatgtacttcattgtaaatcagccccttcagctccatcaaatgtcgcggtcccggcgtggcagtaatgacccagccgccgggcttcactactcgtgctaattcttctgctttacacggcgcgtaaatacgtattatggcgtccatactggtatcggaaaacggcaaacggtggctggaagcgacacaaaaagtgacctgcggatagcgtttcgccgccgcttttatcgctaccttgctaacatccagaccaaacgtggtgatttcgggcaacgcatcggcaaatgcgtgtgtgtaatacccttcaccacagccaatatccagcaccgccgtggccttatcatcaagccgttccctcagttgggcgacaattgcatcacgcagcggctgataatgtccggcatctaagaatgcgcggcgtgcttgcatcatttccgcgctgtcgcccggatcacgagaccgtttatgctgaacgggcagcagattgacatacccttctttcgccatatcaaactgatgtcgctggggacagatatagctgtttttttcacggctaagaggctgatggcaaagtggacaggaaaaagacatgacaactccggcaggatactaaaggccgcaagtgtaacgcgaatcacgcggcgggcaaatatccgaacgccaggagcgaagataaagcatagtaaaaagcctcgcattcgacgaggctttatagcgagattgaagcgtattcacacttcagatcagtggattcgatcagatagctgttacgttaacagctgccggacctttctggccgtcctgaatttcgaactcaacgttctgaccttcagccagagttttgaagccattaccctggatagcggagaagtgtacgaacacatctttgctgccatcagccggagtaatgaagccaaaacctttagactcgttgaaccacttaacctgacctttaatctttgccatttgaaaaattccttagattgttttcttcgcccgcaggcataacatagataaaacactcacattactgcaactggcaccaatataaggctcggcagagaagcggtattcaacgtcaacgtgtttactcaggacttctttactgaaaatgccacacataaacagaactgtacctcgtttaacccgaaatctgttatcacatacaacgttaattatggcaagccatttttaaacatgtctcgatcagacgcacaaatctcgatacgtcttccactttttttgcacacttatgcaacggaatacgcgccgatatatcattgtgcttaaccttgccagttcaggcagatacttaaactggcgtattttctaacatagttcaataagttcagttgttccaggccagtgggagaagttattacatagtgcgtgcaatatcacattttttgctatgcaatgaataaaaagttatatcactttttctcataaaacagtcagttaacggctattaattaccctaaagagaagtcaatccccaaagggattgtaaatttaaaataagaaaaattgatgaatgagcaaaaaaatcaagagagaaacgtttcgctaataaataataccacgcttaatcacaaatccgatgtaaacatcctaataaattaatggggtaaatatctttttctgatatcccgttacgcaaataaataatatgataattatttgaagtcagaccagagttttaatttgaagcagttgcaccatgacagtgcgtataatcaggatgaattgagtaacccttcaacgacggggttactcaagattgaggaaggattatcgttcggcgaccagacgaataatatcttcgtcttcaacgcttttttgactctcaacggtctttttatctgctttctctggttcgtttgcttcgcacaaacgacgtaacagtgcattttgacgtttttgctgatccagcaacgcctcaagcagttcaatctgttcgttagtccgactactggcacgattgataaaaaaccacaagatgagcccgataagaagaaccaccacgcttacaaccaaagacgcaatgttcatcacgccactatttacaacttcgttcatttcaccacctctgagtagaggcgctattctaccactgctggagaggaagaaaatctagtgctgaaaaaatgatatcaccacgggataaactggttaatggcacaaattccgctgaaaaattgtacatcctgatcgcacatcatgttgaatacctgcgcccaaagcagcaagcaagccaacaccacgacaaccagaacgacccatcgaaactttttcactccaatctccgtttcacctaccttatgtcattaaactagcatgcgttagttaaacagcgcctaactatgtcgatattcgtgctttttcggaatgagtcgcttgcttcagcgcatattgccgctacgattaagcgaacataaaaagagaagaggttgtaatgcgattcatcattcgcacagttatgctgatagcactggtatggataggattattactcagcggatatggcgttttgattggaagcaaagagaatgccgcaggattaggtttgcaatgtacctatctgactgccagaggcaccagcacggtacaatacttgcacactaaaagtggttttttggggataacagattgcccgctgttacgcaaaagcaatatcgtggtcgataatggttaagggcaataaataaccagattctcactcctgagtaaaatactcttatagcaagcgcgtttaatataacgccaccttcaactttatttttctcatgctaaataaagaacctgtctgtttgatattccgacaggttcttactctcatcagaacggatagtcgtgataacccatttgggcagaaattttgcgcgctgcggtatgcaacattgcgacatattcctgtaaacgctcttcagagaaacgcaacgtcgggaaggagatgctcaaaccggcaatgaccacgccaaagcgatcaaataccggtaccgcaatgcatcgcagcccttcttcctgctcttcattatcttcgccatacccctgctcgcgcacctggtccagaacgggtaataacgcttctgtactggtgatggtccgctcggtactgcgtttatactccacgccctcaagaatttgcttcacttcatcgcgatcgcgccatgccagcagtaccttaccaatcgcggtgctgtacagcggattacgacgcccaatccgactatacatgcgcaaattgtacatagagtcaattttgtgaatgtaaacaatactgtcttcgtccagtgcgccgaggtggatagtttctttggtcaggcgggagagctcacgcatctggatatctgcgctacgaattaaatcgacgttttgtaacgcgcgagcgcccagttcaaacaatttcagggtcagggaatatttctcgctctccccttcctgcgccacataacctaaggttttcatggtctgtaaaaagcgataaacggtgcttttactcatcatgacgcgctggctcagctcggttatccctatttcgcgctcttcacccagcgcctgcaaaatgccaaaaacttttagcacggaagatacagaatcaggctgtttatccagatctgcgttagccatttatcacctcattgcgagtgttttataaaaatcagaactgttttttattataatttcgcaccagggtggtcgcaatccatcttttgccggttagttacaattctgcgacatccaccgtgaatatcagtgctagaatcatacccctgttgattattcaccaaagatataaaattcctatgccaaaagttcaggccgacggcctgccattgccccagcgatacggtgcgatattaaccattgtgattggtattagcatggccgtccttgacggcgcaatcgccaacgtcgccctgccaacaatcgccacggaccttcatgccacgccagccagttccatctgggtagtgaacgcctatcaaatcgccattgtcatctccctgctcagctttagctttctgggcgatatgtttggctatcgacgtatttataaatgcggtctggtcgtttttctgttgtctagtctgttctgcgccctttctgatagcctgcaaatgctcacccttgcgcgtgtcatacaaggtttcggcggtgcagcgttgatgagcgttaataccgcacttatccgcctgatctatccacaacgttttctgggtagagggatgggcataaacagctttattgttgccgtctcttctgctgccgggccgacaattgctgcagcaatcctctccatcgcatcctggaaatggttatttttaatcaacgtaccgttaggtattatcgccctgcttctggcgatgcgttttctgccacccaatggttctcgcgccagtaaaccccgtttcgacctgcccagcgccgtgatgaacgcgttaaccttcggcctgcttatcactgcgttgagtggtttcgctcaggggcaaagcctgacgttaattgctgcggaactggtggtaatggttgttgttggtattttctttattcgccgccagctttctcttcccgtaccgctgctaccggtggatttactgcgtatcccgctgtttagtctttctatttgcacatctgtttgctctttctgcgcacaaatgctggcaatggtttccctgcccttttacctgcaaaccgtgctcgggcgtagtgaagtcgaaacaggtttacttctgacaccgtggccgttagcaacgatggtgatggctccgctggcaggctatttgattgaacgcgtacatgcaggattgctgggggctttagggttgttcatcatggctgcggggcttttttccctggttctgctgcccgcgagtcctgcggatatcaatattatctggccgatgatcttatgtggtgctggatttggcttattccagagtcccaataaccacaccattattacctccgcgcctcgcgaacgtagcggtggagccagtggcatgttaggaacggctcgtctactgggtcagagtagcggcgcggcgctggtggcgctgatgctaaatcagtttggagataatggtacacacgtcagcctgatggctgcggctattctggcagtgattgctgcctgtgtcagtggtttacgtatcactcagccacgatccagggcataaaaaaagcgcgtcgatcaggacgcgctttttagtatttacttcatattacttcaggtattcacccgtacgcagagcttcaattcgtttatccagcggcgggtgggtcatgaacaactcactgaggcttttgctcttaccgttaatgcagagagccatcatgctggttgcttcttgcggttcatagctggttttcaggcgctgcagcgcggcaatcattttctcgcgaccaaccagttttgcgctaccggcatcagcatggaattcacgatgacggctgaaccacatggtgataatgctcgccagaataccaaacaccagttccagaaccgttgcaaccgcaaagtagatcagcgggttgccgttgctctcttcaccttcatcacgatttccgcccataaaacccgcggcaagctgcgccagaatacgggaaataaagataacgaaggtgttcaccacgccctgaatcagcgtcatggtgaccatatcaccattggcgatgtggctgatttcgtgagcaattaccgcctcggcttcatccgggctcatgttctgcagcaaaccggtgctgacagcaaccagagaggcatcacggcgcgcaccggttgcaaaagcgttgatgtccggcgcatggtagatagccacttgcggcatagcgatccccgcctgacgagcctgggttgctacagtattgaccagccaacgttccctttcgttacgcggttgctcgatcacttccccgccaacagatcgtaatgccatccatttggacatcagaaggctaacgaaggaaccaccaaaaccgaacagcaaggccatgatcatcagcccctgaacgctgctgctctgtatccctgtcaggctcagtaccagcccgaaaacgaccattacggccaggttcgttagcaggaagagcgcgattcgcatcataattttctttttacctcagtttaacaaaacgcaatatgcgatacccacatcgtatgggttacgcgactattttcaagtctggatagtgcgtaagtcaccagaaagacacaactttacattttgtagcatctgatttacggcatcttgtcgctgttaaaaaatcaggcacaatttcttgtgcctgattgatattacttgacgggagcgggttgttccgcgggtctggctttttcaagcttcgccagatcgagtgcgatattcaccgtctcatccagataaggatccggctcctggtaatctttcggtagatcatccagtttcttcaactccggtttaccttcgcgtttaaagcgttcgttcaaacgcgccagacgcgtcgcatcatcttcattattctctttctcacgcacagcgtaattcagagaaacgatattgcgcttgtccttcatagcgttgaagcgcgcgatatccttcatgatgttctggaactcaggatctttcgcgatacgcgcattatgttccttcagcagctccggttcaaaggccgttaaatctccacttttcacataagtcgcggcatcaatgctatcccacggcagcgcgttatcttcgaatttctcacccgtttccgtttcttcattacccgtcggcatgatgatgtctggcgttacgcctttacgttgcgtactgccgccgttaacgcgatagaatttctggatcgtgtactgcacagaacccagcgctggccattcaggacgtaacatctgatcgtaaatacggttcaaactacggtattgctgaacggtgcctttaccaaacgtcggttcacccacaaccagcgcacgaccgtaatcctgcattgccgcggcaaagatttcactagcgctagcactgaagcggtcaaccagcaccaccagcgggcctttatagaaaacctgtccgtcggtatcgctatcttcacgaaccttgccgttgttatcgcggacctgaacaatgggacccgcaggaataaacagaccggagaggcttacggcttcagttaacgccccaccgccattgctacgcaggtcgatgatgacgctgctgacattctgtttttccagtttctgcagttgcactttgacatcgtctgtcaaacccacatagaagcccggaatatccagcacgccgactttctctttaccgacggtcttcacgctcattttaaccgcgcggtcttcgagacgaatacgttcacgggtcaacgttacagtacgggtcttggtccctttaccagcaggtaaaatttccagacgaactttactgcccttcggccctttaattaaggcaaccacatcatcaagacgccagccaatcacgtcaaccatcggcttgcctgtttgaccaacaccgacaattttgtcaccaacgctgatagctttactcttcgctgccggaccacctgccaccatgctattgataacggtgtagtcatcatccatttgcagcactgcgccaataccttccaggctcaaactcatttcagtgttgaactgttcggtattacgcggggaaagatagttggtatgcgggtcgatttcacgcgcaaacgccgtcattgccaggctgaaaacatcttcgctgttggtttgcgccagacgacgaatggcaaatttgtagcggcgagtcagggtttcacgaatttctttatccgtttttcctgtcagcttcaggcttaactcgtcgaatttgactttactgtcccacagcgcgttcaactcagcctcgtttttcggccagggcgctttgctgcggtcaaggttataagtgtcgttgccggtgaaatccatcggcttttccagtacgctcaaagcgtactggtaacgctcaaaacggcgcttttgcgccagattgtagagatcgtagaaaacgtcgagtttgccactacgcagttcatcgcctaactcggttttctttttcgcgaactgttcaacatcgcttgccagcagcacgttgtggctgtaatcgagcagattcaggtagcggtcaaagattttggcgctaaatgcctgatcgaggtcgaactggcgataatgagaacgggtgaagcggctcgttacgcgctcacttaccgtcgcatgctgcgtctcttcctttaataccggaatttgatcagcacgcgtgatatcttctacagcgaaggtctggcctgctattgcaagcaggccagctaacgcggtaagcctaaaaaacatgttcatgcctggcccggcctccgtttcagaacaccaggtgttctgcgcgcacaatcaaagacataccgctattcagctggacgcggacgccgtctttggtgatttctaatacggtggcatccatcgcgttttgacccgctttcaccttcagggcttgtccgacagtcagagcactaatgtcagaaaccggggtgtgctgttcttcgcgaggtgcttttactgtttttggcgctttctctaccggcttttgcgcacgaggtttacgttcagcgccttctttgcggcgtggcgtagtcggacgtggcttgcgttcgcggcgcggtgcgtcttctttctcaccagcagttgcggcagcttcgcgttttttcgcttgctgttcagcacgctgtgcctgaacacgcgctttcgcttcttcaagctgcttgcgagcatgctctacatgttgctcgtccagctcaccgcatgggttgccgtcaagatcgacacgcgttgcgccgggtttaacaccgtaaagataacgccagctgctagtgtagagacgtaaagcggatcgcaattgcgttttgctcaggttcatttccccagcaacacgatcgaccaaatcctgaaaaataccgattttcagcggacgcgcttcaccttccgcactgaaacagtggggaaaacgttcggccagaaacgcgattacttctttactgctattcaacttaggttgattttccatgaaatttcctgattacaacggacgtagccaacaagcgcaggcatgaacaggcgtcattataatgacgctatcagtaaatgctacgttatccgttgattatcctgcgacgctcgcaaagaattttttgtaatccgtcgttgcaagcactttttcaagctgtgccacaagctgacgtaagccttgctcgtcctcgtctgtaaagcgaccgaagacggtactatcgatgtcgagaacaccaataatctgatttttcaccaccagcggcagaacaatttcagaattactcgccgcatcacaggcaatatgcccgtcaaacacatgaacatcctcgatacgctgcacttgattgcgggcaaccgcagtgccgcacacgccgcgcccgacgggtatccggacacaggcaattttgccctgaaatggtccgagtaccagtgtatcgtcctcaagcaaataaaaacctgcccagtttatgtcagtgagacgctcatataacaacgcactggtgttcgcaagcgttgccagaaaactggtttctcccgccatcagcgcgttaaagtcgcgatttaaatccgcgtaaaattctgttttgttcattatataatcacttggttgtcttacctggatctgccagcctattaaaataagcattaaatgcgttaatgctcaagatcattcccatcatgggttaagattaatgttaattcttattacatttggcacgtcatggctcttaacacaccacaaattacgccgacaaaaaagataacagtgagggcaatcggcgaggaactgccgcgtggtgattaccaacgttgcccgcaatgtgacatgctgtttagcctgcccgagataaattctcatcaaagtgcctattgtccgcgctgtcaggcaaaaattcgtgacgggcgcgactggagcctaacgcgcctggcggcaatggccttcaccatgctgttgcttatgccgtttgcctggggcgaaccgctgttgcatatctggctgttaggcattcgtattgacgccaacgttatgcaaggcatctggcaaatgaccaaacagggcgatgcgataacggggagcatggtctttttctgcgttattggtgccccgctcattctggtgacctccatagcttatttatggtttggtaaccgactgggaatgaatttacgtccggtactgctgatgcttgagcgacttaaagagtgggtaatgctcgatatctacctggtcggcattggcgttgcttctataaaggtacaggattatgcccatatccaggctggtgtcggcttgttctcttttgtggcgttggtgattttaacgacggtgacgttgagtcatcttaatgtcgaagaactgtgggagcgattttatccgcagcgccccgctacgcgtagggacgagaaacttcgtgtctgtcttgggtgccattttaccggctatccagatcagcgtggtcgctgcccgcgttgccatatcccgctacgcctgcgtcgccgtcatagtctgcaaaaatgctgggcggcgctgttagcgagtatcgttttattgttacctgccaacctgttgcctatttctatcatttatctgaacggaggacggcaggaagatacaattctttccggaattatgagcctggcaagtagcaacattgcggttgcaggaatcgtgtttatcgccagtattctggtaccgtttactaaagtgatcgtcatgttcactttactgttgagcattcattttaaatgccagcaaggtttacgcacacgcattctgttactgcggatggtgacctggattggtcgctggagcatgctcgacctgtttgtcatatctttaaccatgagcctgattaatcgcgatcagatcctcgcttttactatgggaccggctgcgttttatttcggcgcagcggtaattttgactattcttgctgtggaatggctggacagccgcttactttgggatgcacatgagagtggaaacgcccgcttcgacgactgaataaccgcttactttgggatgcacatgagtcaggaaacgcccgctagcacgactgaagcgcagattaaaaataaacgccgtatcagtcctttctggctgctgccgttcatcgcgctaatgattgccagttggctgatttgggacagttatcaggaccggggtaataccgtcaccatcgactttatgagcgcggatggtattgttccaggccgtacgcctgttcgttatcagggcgttgaagtcggaacagtgcaggatatcagcctcagcgacgatcttcgtaagattgaagtcaaggtcagcatcaagtccgatatgaaagatgcgctgcgcgaagagactcagttctggctggtgacgccaaaagcaagcttggcaggtgtctccgggctggacgccctcgtcggtgggaactatatcggcatgatgccgggtaaaggtaaagagcaggatcactttgtcgcactcgatacccaaccgaaatatcggctggacaatggcgatctgatgatccacctgcaagcccccgatctcggtagcctgaacagcggtagtttggtctatttccgcaagatcccggtgggaaaagtctacgactatgccatcaatcccaacaagcaaggcgtggtgattgatgtcctgatcgagcggcgttttaccgatctggtgaaaaaaggtagccgtttctggaacgtttccggcgttgatgccaacgtcagtatcagtggcgcgaaggtgaaactggaaagcctggcggcactggttaacggtgcgattgccttcgatagtccagaagagagcaaacctgccgaggcggaagatacctttggtctgtatgaagatctggcccacagccagcgtggcgtaataataaaactggaactgccgagtggggccggattaaccgccgacagcacgccgttaatgtatcaggggctggaagtcggacagctgactaaactggatttaaatcctggtggtaaagtcacaggggaaatgaccgttgatcccagcgtcgttaccctgcttcgtgaaaatacccgcatcgaattacgcaacccgaaattatcccttagcgatgctaatctcagcgccctgctgaccggcaaaaccttcgagctggtgcccggcgatggcgagccacgcaaagagttcgttgttgtgccaggcgaaaaagcactgctgcatgaacctgatgttctgacgctgaccctgaccgcgccggaaagttacggtattgatgcgggtcagccgctcattcttcacggcgtgcaggtaggccaggttatcgatcgtaaactcaccagcaaaggcgtcacctttaccgtcgccatcgagcctcagcatcgcgaactggtaaaaggcgatagcaaatttgtcgtcaacagccgtgtcgatgtgaaggtggggctggatggcgttgagtttctcggtgccagcgccagtgaatggatcaatggcgggatacgtattctgccgggcgataaaggtgagatgaaagccagctatccactgtatgccaatttggaaaaagcgctggagaacagccttagcgatttacccaccacaaccgtgagtttgagtgcagagacgctgccggatgtgcaggcaggaagcgtagtgctgtaccgtaaatttgaagttggtgaagtgattaccgtgcgtccgcgagctaacgcgtttgatatcgatctgcatattaagccggagtatcgcaaccttctgaccagcaatagcgtgttctgggcagaaggcggggcgaaagttcagctgaatggtagtggtctgaccgtacaggcatccccgctctccagagcattaaagggagccattagcttcgacaacctcagcggtgccagcgccagtcagcgtaaaggcgataagcgtattctgtatgcttccgaaacagcggcccgtgcggttggcgggcagattacgcttcacgctttcgatgccggaaaactggcggtcgggatgccaattcgctatctcggtattgatatcgggcaaatccagacgctggatctgattaccgcacgcaatgaagtacaggcaaaggcggtactttacccggaatatgtccagacctttgctcgcggtggtacgcgcttcagtgtggtcacaccgcaaattagcgcagctggcgttgagcatcttgatactatcctccagccgtatatcaacgtcgaaccaggccggggcaatcctcgccgcgactttgaattacaagaggccaccattactgatagccgttacctggatggcttaagcattattgttgaagcgccggaagccggtagcttaggcatcggtacgcctgtgctgttccgtggtctggaagtcggtacggttacaggaatgacgctggggacattgagtgatcgcgtgatgattgcgatgcgcatcagtaaacgctatcaacacctggtgcgtaacaattccgtcttctggttggcaagcggttacagtctggactttggtctgacgggcggcgtagtgaaaaccggcacctttaaccagtttatccgtggcggcatcgccttcgccacgcctccgggtacgccactggcaccgaaagcccaggaaggcaaacacttcctgttgcaggaaagtgaaccgaaagagtggcgtgaatggggaactgcgcttcccaaataatgcccactgctccggcgtgcctgcgccggagcgtttatgctaaactgcgcgcctgtttttttgccagtggtacatgctcgtggcccaacacaccgtttatttcccggacgcctttctgacacaaatgcgcgaagcgatgcctagcacgctcagttttgatgattttcttgccgcctgtcagcgcccgttgcgccgcagcattcgcgttaatacgctgaaaatctccgttgctgatttcctgcaattaaccgctccttatggctggacgcttacgccaattccgtggtgtgaagaaggtttctggattgaacgcgacaatgaagatgcattgccattgggtagtaccgccgagcatttaagtggcctgttttatattcaggaagccagtagtatgttgcctgttgccgccttgtttgctgacggtaatgcaccacagcgggtgatggatgtcgctgccgcgcctggctccaaaacgacgcaaatttccgcgcggatgaataacgaaggggcaatccttgccaatgagttttccgccagtcgggtaaaagtgttacatgccaatatcagccgctgtggtatcagtaatgttgcgctcacacattttgatggccgcgtgtttggtgcggcagtgccagaaatgttcgatgccattttgctggacgctccctgctctggcgaaggcgtggtgcgtaaagatcccgatgcgctaaaaaactggagtccagaaagcaatcaggaaatcgcagctacacaacgggagcttatcgacagcgcctttcatgcattacgtcctggtggtacgctggtttacagcacctgtaccttaaaccaggaagaaaacgaagccgtttgcctgtggctgaaagagacttaccccgacgcagtagagtttttaccacttggcgatctcttccctggtgcaaacaaagcgctgaccgaagaaggctttttgcatgttttcccacaaatttacgactgcgaaggcttcttcgttgctcgtctgcgtaaaactcaggcgattcccgccttacccgcccccaaatacaaagtcggtaattttccgttcagcccggtgaaagatcgcgaagctggacaaattcgtcaggcggctacaggtgttggcttaaactgggatgaaaacctgcgcctctggcagcgtgacaaagaactgtggttgttcccggtgggcattgaagccctgatcggtaaagtccgattttctcggttggggattaaacttgccgagacgcacaacaaaggttatcgctggcagcatgaagcggttattgctcttgccagtcccgataatatgaatgcattcgagctgacaccgcaggaagcggaggagtggtatcgcgggcgcgatgtttacccgcaagccgcgccagtggcggatgatgtattggttactttccagcatcaaccgattggtttagccaaacggattggtagccgattgaaaaacagctatccgcgtgaactggtgcgcgatgggaaactttttaccggtaacgcctgacagcgcacaaaaaaagcgcactttttgactggcacattcggctgcctcaactaggctgaaaaatggtgcgatcggactggtcgtaccacaatcggcagctaaatggagagcacgaagatgaaaaccagtgtgcgcataggcgcttttgaaatcgacgacggcgaattacacggtgaaagcccaggtgatcgaacgttaaccattccttgtaaatctgaccccgatttatgtatgcaactggatgcctgggatgctgaaaccagtatccctgccctgctaaatggcgaacactctgtcctttaccgtacccgttacgatcaacaatctgatgcctggattatgcgtcttgcctgatccaaaaagaacccgtcggcatggcgggttatttgtcctggttattcccccgttgtaaaatctctcctaaacttaacggtacggcaccacacttcggggatgaaatgttcgcgctggtactttttgtttgctacctggatggcggttgtgaagatattgttgtggatgtctacaacacggaacagcagtgtctttattctatgagcgatcaacggatccgccagggcggttgttttccgattgaggattttatagatggtttctggcgacctgcacaggagtacggtgatttttaattattgcaattgcacaagagtcagttcgcccccaaagacagcaccggtatcaatataatgcaggttgccaatatccacgcgatgtcgcaacggtgtatgaccaaaccagaaatgatcagcacctgtaattccctgccctttttggcgttcacctaatcggctgcggctccacaagacctgatgcaaatcaacgtccttttgccattcataaacatcatctggataatcggcatgagcaataatatgcttgccggtgcgactgtgtacttcaagaataaagggcaaatgctgacatttttccagcgccgttttcgcttgtttctgttgattatctgccagcgcaataaaccagtcgccgccattcatcaaccacaaagacatctgctgggatgccagcgcatccatcgccatctgttcatgattgcctcttaccgcacaaacccaatgttgttccagtaactgcagacaacgtaaactttgcggcccacgatcgataacgtctcccacactgataagtaaatctcgccacggatcaaaacgacaatgccataatttgcggcgcaactgctcaagacaaccgtgtatatcgccagaaagccagatatgtcgccattgatgacccgcaattctctgataaacgggcgcaggctgtttcatcaatattttcctcccgcgctaaagatcacataatcttaacaagaatgttaaaaaacgctggactcagacagtagagtgtgtgttatggttgactataaagtcagcgaaggaaatgcttctggcttttaacagataaaaagagaccgaacacgattcctgtattcggtccagggaaatggctcttgggagagagccgtgcgctaaaagttggcattaatgcaggcttagttgccttgccctttaagaatagatgacgacgccaggttttccagtttgcgtgcaaaatggtcaataaaaagcgtggtggtcatcagctgaaatgttaaaaaccgcccgttctggtgaaagaactgaggcggtttttttattggaaatcaaaaggctattttaggtaattaacagagtttttcagctcgttctataaacggtgccagactcattttttcgccgggattgttaggatcatcaatctgaatcacgctaatgggttgggcattggtcttcccactggcaacttccttttgtgcgatatcgtttaaaggatactgcacgagggtactcggattaataacatacaaagcattacccggtcggcaagtcagcatcacctcttcgcgattaaacgcccatttgtctttacccacttcaaaacgactgacggtaatcacctgcggtgcagccagcgccgctgcagaactggtgagtaacagaaacgccagaatactttttttcatcattttcgtaatccatcaaaaaggttcgagagtcgcaagcaggctgatgatcaccagcactaccgcacctatcgcccattcgagtttagtcatccacacaaaccagggtgccgcacgatcttcatcctgcctcatgcgcggtacaagaacataacgattagccagcgcaatgaccaccataatcatcaccaggatggctttgagcaataagagttggccccagtaagtcgtaagcgtggggggaaatccggtaatcaacaatgcattaagcacgccgcttgccagtacgccgatcaccgcaaaatgcccgcaccaggaaaaacgcatcagcgcctgaatagcctggtgtcgccaacggcctttgatgagttgcatacaccagagcaccggcagtaatcccccaaaccacgccgccgcacaaatcaggtgaatcgcgtgattagtctgatggattttcgctgttaccccttcattcagcgtcgcatgccccactcccgccagcagaataaattgcgcggtagtgagcataaacagcaaacgtggcatattccgcggttgcataagggcgacgatcaacgttacgagggcgagaacaatttgccataaccagatgccaccaaactgcgtttgcaaaacagcctgccaaatgtttgggctaaatacatctgtccatcccgttcccatcaacccgccctgaacggcgagcattgcagtggcactgatcaaactccagacggcagcgtgctgttgtaaacgcagaaaacgcttcgccagcaagcgacgaatcgtcaagggggccagccaggcaccgtacattgcgaagccaaaaaccagcatcaggctggtgaaatggataaatcgcagcgcgatccaggtaaacgccagcatgatttatttcacgctaaaggtgtagtgtcctttcgttttatgcccgtccacgctaacaacatgccagtcaacggtgtaggttccgggtttcaggctatcggccagtggaacaatcagttgcttttggtcctgctcatttcgcttcgccggtaatgttttaatattttcgttttttggccccgtgatttttgcaccactgaatcctgtttcaacaccttcgctgaagtttaaagtgattgcctgcggtgcagctgtcacttgcgcgtttgccgcaggatactgatgcgttaaatgcgcatgtgcccagacggaaggtgtcaccaagctagtggtcaggattgccagcgcgtagcgaagggagcgtgcagtactagccatattatctattcctttttgtaataacttttttacagagcataaccttgtctaatgtctgagtcgaggatcatcaattccggcttgccatcctggctcactcttagtaacttttgcccgcgaatgatgaggagattaagaatgctgaagaatctggctaaactggatcaaacagaaatggataaagtgaatgtcgatttggcggcggccggggtggcatttaaagaacgctacaatatgccggtgatcgctgaagcggttgaacgtgaacagcctgaacatttgcgcagctggtttcgcgagcggcttattgcccaccgtttggctagcgtcaatctgagtcgtttaccttacgagcccaaacttaaataaaacttatacagagttacactttcttacataacgcctgctaaattatgagtattttctaaaccgcactcataatttgcagtcattttgaaaaggaagtcattatgagcttctggaaagttgcagcagcgcaatatgagcctcgtaaaaccagtctcaccgaacaggtagctcatcatctggagtttgtgagggccgccgccaggcaacaatgtcagctgttagtttttccaagcctttctttactggggtgtgattatagccgacgtgcccttcctgccccacccgatctcagtctgttagacccgctttgttatgccgcaacgacctggcgaatgaccatcattgccggccttcccgttgaatataacgatcgctttattcgtggaattgcggtgttcgcaccgtggcgaaaaacgcctgggatctaccatcagagtcatggtgcatgtctgggccgtcgttccagaaccatcacggtggtcgatgaacaaccgcaaggtatggatatggacccgacctgtagtctgtttactacagggcaatgtctgggagaacccgacctgctggcgagcgcccgtcgcttacaattttttagtcatcagtacagcattgccgtgctgatggcaaatgcccgtggtaacagtgcactatgggatgaatatggtcgtctcatcgttcgcgccgatcgtggtagtttattgttagtcggtcagcgtagtagtcagggttggcaaggcgatatcattccattacgctaagctttttcggcctggagcatgccatgttgcgcattatcgatacagaaacctgcggtttgcagggagggatcgttgagattgcctctgttgatgtcattgacggaaaaatcgtcaaccccatgagccacctggtgcgccccgatcgtcctattagtccacaagcgatggcgattcatcgcatcaccgaagccatggtcgccgataaaccgtggattgaagatgtgatcccacactattacggtagtgaatggtatgtcgcgcataacgccagctttgaccgccgcgtactgcctgagatgcccggtgagtggatttgcactatgaaactggcccgtcgtttgtggcctgggatcaagtacagcaatatggcgttatataaaacacgcaagctcaatgtacagacgccgccgggcctgcatcatcaccgcgcgttgtatgactgttatatcaccgccgcgttgcttatcgatattatgaacacctccggctggacggcagaacagatggccgatatcaccggacgtccgagcttgatgacgaccttcacctttggcaaataccgtggcaaagcggtttccgacgttgccgaacgcgatccgggctatctgcgctggttatttaataacctggacagcatgagcccggagctgcgtttaacactgaaacattatctggaaaatacttaatccgcaggcgtagcgggtaatgttccctgcgccagcgcgaccagaaaagcatattccatcgctacgccttcgtagcttttaaagcgaccagatttaccgccatggccactgtccatgtcggtacagagcaataaaagatggtcatcggttttcagctcgcgcaatttagcgacccattttgccggttcccaatattgcacctgagaatcgtgcaaaccggtcgttaccagtaaatgcggataagcctgtgcggtgacgttgtcatacgggctgtagcttttcatgtactcgtaatattgcggatcctgcgggttaccccactcttcaaactcaccagtggtaagaggaatactttcatcaagcatcgttgttacaacatcaacaaacggtacctgggcgataacgccgtggaataattccgggcgttgattaattgcaacgcccatcaacatgccccccgcactcccgcccatcgcataacaaaggctaggagagccatagcccagttttaacaatgcatcgcaggcatcaagataatcattaaacgtatttttcttcttcagaaattttccgtcttcgtaccattgttgccccagctcaccaccgccgcgaacatggacaatggcgtagacaaagccacgatctaacaaactcaagcggctaaaactgaaatcggcatcaatacttgcgccgtaagaaccatagccatacaccagcaacgggttgtgtcctttgcgaaaatgtttgcgatggtagaccaagctaaccggaacttcgacgccatcacgggcgactatccacaggtgttcactgcggtaattcgccgcataaaaaccaggaacttccgtttgttttaatacacgacgctcaccggtatccatatccagttcaaacaaagtgtctggtgtagtcatggaagaataaccataacgcaatcgcgcggtttcaggttctggattgtaggcaatccaggtcacataggccggatcatcaaaggcaataccaatgacttcccgggtcttgcggttaatttggcgcaaactggttaacccgcgctgacgctcttcaaccaccagccagtcggtaaacagcgtaaacccttccagcatgatgttttcgcgtggcggaattaactcttcccactgttgctcatcacgcatacgggtacggtataagccaaagtttttgccgtggcggttggaacgcagataaaaacgatgctggtagtgatcaaggctgtattcgtgatctttgcggcgcggcagaaaaacaaacggctcggcatcggccatttccgcgtccagcaggcgaacttcactggtggtggcgctggccaaatgaatgactacatagtgcttgctggtcgttttatgcaggctgacgtaataggtatcgtctttttcttcgtagatcagtttatcttggcttgctggcgtaccgatggcgtgacgccagacctgataaggcagcagcgtcaccggatgcttgcgaacatagtagaaaatccaggagtcatttgcccagacaaagctgggttcaacgttatccagcagttccgggtaccagttaccagtttccagattacgaaaacgaatgccgtactggcgtcgggaaagaaaatcttctgccagcgccataatggtgttatcgggcgtaatcgccattccgcccatgctataaaactcactatgagctgcgcgcttattggcatcgagcaatgtttcccactcatcccactcttcactgaatgcgctttgacgctggtagatagcatattcacagcctggttcataaatatgccgatagcggtagccatttttgatgtagggcgcagaaacttctcgttgcggaatgcggtcgatgatttcctttaagatgcgatcctgcaaggcttgttgactggccatcacccgatgaccgtaactattttcttgttgcaggtagtccaggacttctggctgagaacgcgtatcgtcccgcagccagtagtaattatcgatgcgcgtatcgccatgaagcgtcatggcgtggggaatgcgggcggcttttggtagcatgttattgttctttctggttgaaacatcttataagggtggcaaaactcaccggggatgcaagcgaaacaggggagtcattgcttagatgatgacaggtaatggcgcggatatcgaatgttatgcagacagagaaaatcagcctgttcaaatggctgtgcgattctggatagcccgaaatagtcaacttcaggctatccagagagcggaattattccgccaaagtgcgtttttgctgttcgagatcgcgttcaatgccgtcacgaacatcctgggggattttcagcgcgtcacccagtgcattcaggtaactgcgttccataaaatggtcaatatcaatagccgcgcaactcaggaaatagatttccagcgcctcttcttcattgcggaccccggtagccaggcgttgtggatccagcggttgttcgattgcctgctcaatgagtacacgcccctgctcttccacgccggctccacgcaattgctggtcgattgccgcacgttctttggcatcaatatgaccatcacttttagcggcaaagaccagcgcaaggatcaaacgtgctgtacgctcatccagcggcgtactttgcgcgccaaactgcggttcgtcctgatgcgccgcgcgaattttatctttgtatttattccacagcaccgtacccgctaccgctccgccgccaaccagtaacgcgttggtgccatatttcgtaagaagtttacgtgcacttttatttgcgaccagcagcccagccagtccgcctaatgcgcctggcactaacagtttgaccaatccctgatccgcagagctggaggtagaagaactgctttgcccaagcagggattgcagttgatttaaccagttagccatatttgctcctcaataaccatttttagtgcctgtagcatagcggatgaggatgtcagaaaatgtatatcgagacaaaagatgcgcaaataagcggggcggtaggccgttattcaaagaaattcgcgccaggtaaggtatttactgtatatcaggtgataagggtattttaggtgaaagtagtttgtcgttttgagtggcattgtttgatgctgattgcccgatgcgacgctgttgcgtcttctcaggcctacgattgtggtgcgttctggggcggacaaggcactcgcgccgcatccgccaacagtcaatcgaattatcagaagccattaacgccgctgatattccgccattcccgctttgcagtccacgctgacctggtaatgaatatcggcacttttaccacgcacggttagcggtacactccatttatcatctttaccctgaatgtcctgcaaactgacccaagccacgggatcggcctgaccgacaattttttgatcatctgcccaacgcgccacgcgattttgttgataatcacgttttacgctcgcggcaattccggcagcatccagatcttcacactttgggaaagtgacgctcttgctggtttcattattggcagcgaaaacacttgcgcaggcagaaaccaacaacagccctaaaaacgcccctctttttttcatgtttttctccatagcacaatgattcaggagaaagcatggtacaaattgtcaggagcgcaagttgcttcaggccgcgtgactggcatcttcctcttcggattcagcaccgacgacctgtggggacggtaatttgccggttttcagaatggtgctcagcacatctttttgttctgccagccataggctaagggcttcacgttgctcgtcttccatttgcactggagaatttgtcagccaggtgtcaagcagatccgccgtatcaagcattttgtcataagcatcggcttcctttttgctggtaaagctcattttctcttcgccctcacgaatgactacgtatttaacttcaaccgccatttgcagcctctcataataactgtgattttatacagtatatttcttttcggttgagaaatcaacatcagcaataaagacacacgcaaacgttttcgtttatactgcgcgcggaattaatcaggggatattcgttatgacgttattaggcactgcgctgcgtccggcagcaactcgcgtgatgttattaggctccggtgaactgggtaaagaagtggcaatcgagtgtcagcgtctcggcgtagaggtgattgccgtcgatcgctatgccgacgcaccagccatgcatgtcgcgcatcgctcccatgtcattaatatgcttgatggtgatgcattacgccgtgtggttgaactggaaaaaccacattatatcgtgccggagatcgaagctattgccaccgatatgctgatccaacttgaagaggaaggactgaatgttgtcccctgcgctcgcgcaacgaaattaacgatgaatcgcgagggtatccgtcgcctggcggcagaagagctgcagctgcccacttccacttatcgttttgccgatagcgaaagccttttccgcgaggcggttgctgacattggctatccctgcattgtaaaaccggtgatgagctcttccggcaaggggcagacgtttattcgttctgcagagcaacttgctcaggcatggaagtacgctcagcaaggcggtcgcgccggagcgggccgcgtaattgttgaaggcgtcgttaagtttgacttcgaaattaccctgctaaccgtcagcgcggtggatggcgtccatttctgtgcaccagtaggtcatcgccaggaagatggcgactaccgtgaatcctggcaaccacagcaaatgagcccgcttgcccttgaacgtgcgcaggagattgcccgtaaagtggtgctggcactgggcggttatgggttgtttggtgtcgagctatttgtctgtggtgatgaggtgattttcagtgaggtctcccctcgtccacatgataccgggatggtgacgttaatttctcaagatctcagtgagtttgccctgcatgtacgtgccttcctcggacttccggttggcgggatccgtcagtatggtcctgcagcttctgccgttattctgccacaactgaccagtcagaatgtcacgtttgataatgtgcagaatgccgtaggcgcagatttgcagattcgtttatttggtaagccggaaattgatggcagccgtcgtctgggggtggcactggctactgcagagagtgttgttgacgccattgaacgcgcgaagcacgccgccggacaggtaaaagtacagggttaaacccggcaaaaaaacgctacaaaaatgcccgatcctcgatcgggcattttgacttttacagcttagcgccttctacagcttcacgcgccagcttagtaatgcggtcgtaatcgcccgcttccagcgcatctgccggaaccagccaggaaccaccgatgcacagcacgcttttcagcgccaggtagtcacggtagttagccggagaaataccacccgtcgggcagaaacggacctgggagaacggacccgcgatcgcctgcagggctttcacgccgccgttagcttcagccgggaagaatttgaactctttcaaaccgtagtccatacccagcatcagttcggaaacagtgctgatccccggaatcagaggaatagtcccttcggtagcagctttcagcagcggctcggtcagacccgggctaattgcgaactgtgcacccgcttcagtgacttctgccagctgctgtggattcagcaccgtaccggcacccacaatcgcttcaggcacttctttggcgatagcacggatagcgtcaactgcacactcggtacgcagagtcacttccagaacgcgcaccccaccagcaaccaacgcttttgccatcggcaccgcgtgttccagtttttttaccacgataaccggtacaaccgggccggtggtcaggatactttctgcacttgttttccagtttttcatcagagttttctctcgcctgattacaaatttgtcgtcttaaaaagtgatacaggttgcgccctgttcggcaccggacagtttttcacgcaaggcgctgaataattcacgtcctgttcccacgcgactcgcgctcaggtcaggaatgtgcggttcgcgagcagccagttccgcttcgtctaccagcagcgtcagttcgcctgtctgtccattcacacgaatgatgtccccgtcgcgcacttttgccagcagcccgccatcgtaggcttctggtgttacgtggatagcactcggcactttaccactagcgccggagagtcgtccatcggtaactaacgcaattttgaaacaccggtccaataatacaccaagtggcggcatgagtttatgtaattctggcattccgttcgcttttggcccctgatgacggacaacaacgacacaatcgcggtccagcaaacccgcttcaaaggccggcataacgtcatgctggctttcaaaaacaaccgctggcgcttcaatcacctggttctcaaccggcacggcagaggttttcataaccgcacggcccaggttaccgcttaacacttttgtcccaccatgatgagagaaaggttgttcgaaggaagcgatcacattgctgtcgagacttttttccgccccttcccgccagtccagttcaccattattcagccatggttcaagggtataacgagacagaccaaaacctgccaccgtattgacatcttcatgcagcaggcctgctttgagcagttcacgcaccagaaccggtacgccacctgccgcctggaagtggttaatatcggccggaccgttcgggtagagacgtgccatcagcggtacaacatcagaaaggtcagagaagtcatcccagttaatctgaataccggccgcgcgcgccatcgccaccaggtgcatggtgtggttagtggaaccaccggtcgccagcagtgcaacgataccgttcaccaccactttctcatcgatcatcttaccgatcggcatccattcattaccattaccggtcatgcgtgtaacctgacgcgcagctgcggcggtcaaagcatcgcgcagcggagaatccggatgaacaaaagaagagcctggcaactgcatccccataaactccaccaccatctggttggtgttggcagtaccgtagaaagtacatgttcccggcgcatggtaagacgcggcttcactctccagtaaggccatgcggtccactttaccttcggcataaagctggcgaatacgcactttttctttatttggcaaaccgcttgccatcggtccagacggcacaaacaccgcaggcaaatgaccaaagctcagggctgccatcgtcagacccgggacaatcttgtcgcacacaccgaggaacagagcaccatcaaacatgttatgggacagccccaccgccgcagacatcgctatcacttcgcggcttagcaggctcaattccattccatcctgcccctgggtgacaccatcacacatcgccggaacaccgcccgcaacctgaccaaccgcattcgcttcatgcagggctttacgaatgatttctggatagtgttcataaggctggtgcgcggagagcatgtcgttataggaggtgatgatggcgatattgttacgcaacatgcttttcaaagaggctttgtcttctggctggcaggcagcgaaaccgtgtgccaggttaccgcatgccaactggctacgatgaacggtgctagttttcgcttgttctatccgggcgagataagcagagcgagtctcgcggctacgttcaatgattcgatttgttacgcgtaacaattgtggattcataaaggctcctgaaattgagttgtcagagcaggatgattcacaacgcgtttcattcagaggatttatgactgaaacgcctgtaaccggagctcatagggcaaaaacgtttcagtcagtgtaataaaaaaagcctcgtgggtgaatccgcacgaggcctgaaagtgtaaaaattgttctacaatctgcgcaagatcatgttaccggtaaaataaccataaaggataagcgcagatattactcaaactcattccaggaacgaccatcacgggtaatcatcgccacgctggcaacgggtccccaggttccggcctgatacggtttcggcgcatcattgtccatcgcccacgcctcagtaatggagtctacccatttccaggcttcttccacttcgtcgcgacgtacaaacagtgcctgaataccacgcatggtttccagcagcaaacgttcataggcatccgccagatgcgtctgattaaaggtttcactatagctcagatccagcttggtgatttgcaggttatgtttgtggtcaaggccaggaactttattcagtacctggatatccacgccttcatcaggttgcagacggatagtcagtttattctgcggcagatcctgccagctttctttaaacagattcagttcaggtgttttgaaatagaccacgacttcagaacatttggtcggcagacgtttaccagtacgcaggtagaatggcacaccggcccagcgccagttatcaatgtcgacgcggatcgccacgaaagtttctgtattgctgctcttgttcgcgccctcttcttccagatatcccggcacttttttgccctgggcgaagcccgcagtatattgcccgcgtacggttttttcgcgtacgttggagcggtcgatgcggcgcagagacttcagtactttcactttttcatcgcggatgctgtctgcgctcaggtcagacggcggagacatcgcaatcatgcaaagaatttgcagcaggtggttctggatcatgtcgcgcatctgaccggctttatcaaaatagccccagcgcccttcgatccccacttcttctgccacggtaatctcaacatgatcaatggtgcgattgtcccagttattcacaaacagggagttagcaaaacgcagcgccaacaggttcagcaccgtttctttaccaagatagtggtcgatacggtaaacctggcactcctcgaagtattcgccaacctgatcattgatttcctggctggtcgccaggctcgtccccagcggtttctccatgactacgcgtgccggtttagcattcagttttgcctcgccaagccctttgcaaattgcgccaaaagtgctgggcggcatggcaaagtagttaatggtgatacgatttttttgatccagcatcgcgccgagacggctgaatgcagcagtgtcattgacatcgagattacaaaaatccagacgtgcactcagggtgtcccataaaccttcatcaatggtttctttcatgaaagtttcgagcgcctcgcggacaactttggtatatgccgctttatcccagtcagcacgccctacgccgataatccgggtgtccgggttgagctgaccggctttttccagttgatacagggaaggcagcaatttacgacgcgcaaggtcgcctttcgcgccgaaaatgaccaggtcacaggcctgggctgtttgcgttaccgccatgtcattctccttaagttaactaacccggtacttaagccagggtatacttgtaattttcttacggtgcactgtactgcttttacgagcttgcgaaaactgtaaacgcttatccacccgtgcgattacgggaaaagcgcgcaaagtgcggcaaaactgataaaaaaatcatcgttttccattgggtaaaaatctgacactgatcatgttatgaaaaaaaataacaacttttttatctgcttttgtcattaacacggcacacaggcgtaatatctgacaaaactgcatttcgatttctttcagtgcggaaatcgtcattacccgtgagtctctttacatcatgaatatgctggaaaaaatccagtctcagctggaacatttgagcaaaagtgagcgcaaagttgccgaggtcattctggctagccccgataacgcgatccatagcagtattgctgctatggcactggaagccaatgttagcgaaccgacggtgaatcgtttctgtcgcagcatggacacgcgcggttttcctgattttaaacttcatctggcacagagtctggcgaatggcactccctatgttaatcgcaatgtcaatgaagatgacagcgttgaaagttacacagggaaaatatttgagtccgcaatggcaacgcttgatcatgtccgtcatagtctggataaatctgccatcaaccgcgccgtcgacttgctcactcaggcaaaaaaaatcgcctttttcggattaggctctagtgccgccgttgcccacgatgcgatgaataagttctttcgttttaatgttccggtggtgtactccgatgatatcgtgctgcaacgcatgagttgtatgaattgtagcgacggagacgtggtggtgctgatttctcacactggaagaacaaaaaatctggtcgagctggcgcagctggcacgcgaaaacgacgccatggtgattgccctcacctctgcgggtaccccgctcgcccgggaagcaacgctggcaattaccctcgacgtaccggaagatactgacatttatatgcccatggtttctcgacttgcacagctgaccgtgatagatgtgctggcgacaggatttactttgcgacgcggtgcaaaattcagagataacttgaagcgggtcaaagaagcgctgaaggaaagccgttttgataagcagttacttaatttaagtgacgatcgctaaaaacgactgtcactgtcctaatcttatacgacatccgaatgagattaatttatcgccatcgcggcgttatttcattcggatttcatgttcaagcaacacctggttgtttcagtcaacggagtattacatgtccagaaggcttcgcagaacaaaaatcgttaccacgttaggcccagcaacagatcgcgataataatcttgaaaaagttatcgcggcgggtgccaacgttgtacgtatgaacttttctcacggcagccctgaagatcacaaaatgcgcgcggataaagttcgtgagattgccgcaaaactggggcgtcatgtggctattctgggtgacctccaggggcccaaaatccgtgtatccacctttaaagaaggcaaagttttcctcaatattggggataaattcctgctcgacgccaacctgggtaaaggtgaaggcgacaaagaaaaagtcggtatcgactacaaaggcctgcctgctgacgtcgtgcctggtgacatcctgctgctggacgatggtcgcgtccagttaaaagtactggaagttcagggcatgaaagtgttcaccgaagtcaccgtcggtggtcccctctccaacaataaaggtatcaacaaacttggcggcggtttgagcgctgaagcgctgaccgaaaaagacaaagcagacattaagactgcggcgttgattggcgtagattacctggctgtctccttcccacgctgtggcgaagatctgaactatgcccgtcgcctggcacgcgatgcaggatgtgatgcgaaaattgttgccaaggttgaacgtgcggaagccgtttgcagccaggatgcaatggatgacatcatcctcgcctctgacgtggtaatggttgcacgtggcgacctcggtgtggaaattggcgacccggaactggtcggcattcagaaagcgttgatccgtcgtgcgcgtcagctaaaccgagcggtaatcacggcgacccagatgatggagagtatgattactaacccgatgccgacgcgtgcagaagtcatggacgtagcaaacgccgttctggatggtactgacgctgtgatgctgtctgcagaaactgccgctgggcagtatccgagtgaaaccgttgcagccatggcgcgcgtttgcctgggtgcggaaaaaatcccgagcatcaacgtttctaaacaccgtctggacgttcagttcgacaatgtggaagaagctattgccatgagtgcaatgtacgcagctaaccacctgaaaggcgttacggcgatcatcaccatgaccgaaagcggtcgtaccgcgctgatgacctcccgtatcagctctggtctgccaattttcgccatgagccgccatgaacgtacgctgaacctgactgctctctatcgtggcgttacgccggtgcactttgatagcgctaatgacggcgtagcagctgccagcgaagcggttaatctgctgcgcgataaaggttacttgatgtctggtgacctggtgattgtcacccagggcgacgtgatgagtaccgtgggttctactaataccacgcgtattttaacggtagagtaagtacgttgccggatgcggcgaaaacgccacatccggcctacagttcaatgatagttcaacagatttcgaatattctgaagcaaacttgaacttatcatcaggcgaaggcctctcctcgcgagaggcttttttatttgatgggataaagatctttgcgcttatacggctggatttcgcccggtttgcgagttttcagcaattttagtatccaggtgtattgttctggtcgcggaccaacaaaaatctcgacttcttcattcatccgccgcgcaatcgtatgatcatccgcctctaacagatcatccatcggtgggcgcacctgaatcgtcagacgatgcgtcttgccatcataaatcggaaacagcggtacaacgcgcgcacggcacactttcatcaaacgaccaatcgcgggcaacgtcgctttataggtggcaaagaaatccacaaattcgctgtgctctgggccatgatcctgatcgggtaaataatatccccagtacccctgacgtacgctctggatgaatggtttaataccgtcatttctcgcatgcagacgaccgccaaagcgacgacgcaccgtgttccagacataatcaaaaaccgggttgccctgattatggaacatcgctgccattttctgcccttggctggccatcagcatggcaggaatatcgacggcccaaccgtgcggcaccagaaagataactttctcgttattacgccgcatctcttcgatgatctccagcccttgccagtcaacgcgcggctgaattttctccggcccgcgtattgccaactcagccatcattgccatcgcttgcggcgcggtggcaaacatctcatcaacaatcgcttcgcgttcagcttcactacgttctggaaagcagaggctcagattgattaacgcacgacggcgactgctttttcccagtcgtccggcaaaacgtcccagccgtgccagaatgggatcacggaactttggcggcgttaaagcgatacccgccatcgctgctacgcccagccatgctccccagtagcgcgggtggcgaaaggatttatcaaactcaggaatgtattcgctattattttttttcgtttccatgcttttccagtttcggataaggcaaaaatcaatctggtgatagtgtagcggcgcaacttgccccgcaccaaataaaaaaagccggtactgactgcgtaccggctgcgaatggatgttaattaatcaaaccgtagctgcggcacaatctctttggcctgcgccaggaattcgcgacgatcggagccggtcagcccttcggtacgcggcagttttgccgtcagcgggtttacggcctgctggtttatccatacttcatagtgcagatgcggcccggtactacgtccggtattaccggaaagcgcgatacggtcgccacgtttcaccttctgtcccggtttcaccagaatcttgcgcaagtgcatataacgcgtggtgtagctgcgaccatgacgaatagccacataataacctgctgcgccactgcgtttggcaaccaccacttcaccgtcacccacactaagcactggcgtaccctgcggcatggcgaaatcaacacctctgtgtggtgcaacgcgaccggtcaccggattagtacgacgcgggttaaaattagagctgatacggaactgtttcgccgtcgggaatcgcaagaatcctttcgccagaccagtaccgttacgatcgtagaatttgccatcttcagcgcggatagcgtaataatctttaccttcactacgcaaacgtacgcccagcagctggctttgctcacgtttaccatcaagcatttctcgagacattaacaccgcaaattcatcgccttttttcagtttgcggaaatccatttgccactgcatggctttaatcactgcgctcacttcggcgctggttaaaccggcgtttctggcgctggcaacaaagcttcccccgacggtacctttcagcagattgttaacccactctccttgctgcatttcgctggtcattttaaaaccgttagcggcagtacggtcataggttcgggtttcacgacgagacacttcccaggtgaggcgctgcagttcgccgtccgcggttaatgtccaggagagttgttgaccgattttcaggttacgcaattctttgtcggccgcagccagttgggtgatatcacccatatcaataccatactgattgagaatgctgcttagcgtatcgccagtggaaacaacatattcatgcacgcccgcttcaccggcgattttgtcatccagttcgtcctggggaatggcttcatcttcttgtgcagcttgatcaatcggctcactggcttcaggtaagaggctacgaatttcgttctgttccagctcaatggttttgacaattggcgtggcatcacggtgataaacataaggccgccagacagcgacggccagagtaagaacggtgaggctccccaacataacgcggtgtggtcgcggtaaattattaaacgccagggcgacagagcgggctatctgttgcacgtaatcacttcctcattaatctcctttcaggcagctcgcatactggttggctaattgactcaggaattcactatagcttgttttacccagtttgatattcgtccccaggggatccaacgttcccatacgaacggatgtccctcgtgcgacgctctcaacgaccgctggcctgaactgtggctcagcaaaaacgcaggttgctttttgctcaaccaactgtgttcttatttcatgtaaacgctgcgcgccaggttgaatctcagggttaacggtaaaatgaccaagcggtgtcagtccaaactgtttttcgaaatagccgtaagcatcgtgaaaaacgaaataacctttccccttgagcggcgcgagctcgttaccaacctgcgtttcggtactggctaattgtgcctcaaaatccttcaggttggcgtcaagtttggctcgactttgcggcataagttccactaattttccatggattgcaaccgctgtagcccgcgctatctctggggaaagccaaagatgcatgttgaaatcgccgtgatggtgatcttcgtcacttttttccgcgtggtcgtgatcatcatcatcgccgtgaatacttttcatcagtagcggtttcacatcttcaagctgcgcaatcgttacctgcttcgctcctggtaatttgcttaccggtttttgcataaacgcttccatctccgggccaacccaaacgactaagtccgcgttctgtaagcgttttacatcgcttgggcgcagactataatcatgttcactagcgccgtcaggaagtaaaacctctgtttctgttaccccatcagcaatggcagaagcgatgaacccaacgggtttaaggctagcgacaacggcggcatctgcggcctgtgttgcacctccccagagagcggcggataatgctgcgaaaagaagcgtttttttatgtaacataatgcgaccaataatcgtaatgaatatgagaagtgtgatattataacatttcatgactactgcaagactaaaattaacatgacaagtctggtttccctggaaaatgtcagcgtttcttttggccaacgccgcgtcctctctgatgtgagcctggaacttaaacctggaaaaattttgactttacttgggccaaatggcgcaggtaagagcacactggtacgggtagtgctcgggctggtaacacccgatgaaggggttatcaagcgcaacggaaaactgcgcatcggctatgtaccgcagaagctgtatctcgacaccacgttgccactgaccgtaaaccgttttttacgcttacgccctggtacacataaagaagatattttgcctgcactgaaacgtgtccaggccgggcacctgattaacgcaccgatgcaaaagctctctggtggcgaaacgcagcgtgtactattagcgcgagcattgttaaatcgcccgcaattattagtgctggatgaacccactcaaggcgtggatgtaaatggccaggtggcgttatatgaccttattgaccaactgcgtcgtgaactggattgtggcgttttaatggtttctcacgatctgcatctggtgatggcaaaaaccgatgaagtgctgtgcctgaatcaccacatttgttgttccggcacaccggaagttgtttccctgcatccggagtttattagtatgtttggtcctcgtggtgctgaacaactgggtatctatcgccatcatcataaccatcgtcacgatttacagggacgaattgttttgcgtcggggaaatgatcgcagttgatttaacgtcggggaaatgatcgctcatgattgaattattatttcccggttggttagccgggatcatgctcgcctgtgccgcgggtccgctgggtagctttgtagtctggcgtcgtatgtcttatttcggtgatacgctggctcatgccagtttacttggcgtcgcgtttggtttgttgctggacgtgaatccattctatgcggtgattgccgttacgctgctgctggcgggcggtctggtatggctggagaagcgtccacagctggcgatcgacacgttattagggattatggcgcacagtgccctgagcctgggcctggtggtcgtgagtctgatgtctaatattcgtgttgatttgatggcttacctgttcggtgatttgctggcagtgacgccagaagatctcatctctattgcgattggcgtggtcatcgtggtggctattttgttctggcaatggcgcaatttgctgagtatgacgataagcccggatctggcgtttgttgatggtgtgaaattacagcgagtgaaattgttgttgatgctggtgacggcattgacgattggtgtagcgatgaaatttgtcggtgcgttgattattactagcttgctgattattcctgctgctactgcgcgtcgctttgcccgcacgccggaacagatggctggtgtcgctgttttggtggggatggtggcagtgactggcggtttaaccttttccgcggtttacgatacgccggcgggtccgagcgtggtgctatgtgcggcactgttatttattctcagtatgatgaaaaagcaggccagctaatctatcgctgaacacatttgtcggatgcggcgcgagcgccttatccgacctacggttcggtatctctggtagtcctggtaagacgcgaacagcgtcgcatcaggcatattgccagtgccggatgcggcgcgagcgaccaatccgacttacggcatttctggcggcgttatgccaaagtgattccacgcccgcgtcgtcgccatacgcccacgcggtgtacgctgcaaaaagccttgctgaatcaaataaggttccagcacatcctcaatggtttcacgttcttcgccaatggctgccgccaggttatccagacctacaggtccaccaaagaacttatcgattaccgccagcaacaatttgcggtccatataatcgaaaccttcagcatcgacattcaacatatccagcgcctgagcagcgatatctgcgctgatggtgccatcgtgcttcacttcggcgaaatcacgcactcgacgcagcagacggttggcaatgcgcggcgtaccgcgagcgcgacgagcaacttccagcgcgccgtcatcactcatctcaagccccataaagcgtgcgctgcgactgacgatatattgcagatccggcacctgataaaactccagacgttgcacaataccaaaacggtcgcgcaacggacttgtcaggctacctgcgcgcgtggttgcaccaatcagggtaaacggcggcaaatcaattttaatggagcgtgccgccggaccttcaccaatcatgatatccagttggtagtcttccattgccgggtacagcacttcttcaacaactgggcttagacggtggatctcatcaataaacagcacgtcatgcggttcaaggttagtgagcatcgcagccaaatcgcccgccttttccagcaccggaccagaagtcgtgcgtaaattaacgcccatttcattggcgacaatgttggcaagcgtagttttacccaaccccggaggaccaaaaatcaacaaatgatcgagggcatcgccgcgcagtttcgctgctttgatgaaaatctccatctgactacgaacctgcggctgaccaacatactcttccagtaatttggggcgaatggcgcgatctgctacatcttccggcaaagtggtaccggcagaaatcagacggtctgcttcaatcatcctttacctcataacgcggcgcgtagggcttcgcgaattaaagtttcactgctggcgtcagggcgagcgattttgctcaccatgcggcttgcttcttgtggtttatagcccagcgccaccagcgcggcaaccgcttcttgttcagcatcgtcggtcgccgggctggcaggagacgtgagtaccaggtcggcggctggcgtaaagagatcgccatgcaaacctttaaatcggtctttcatttcaacaatcaagcgttcggcggtttttttgccaatacccggcagtttcaccagtgcccccacttcttcacgctcaacggcattaacgaactgctgcgcactcattccggagaggatcgccagcgccaacttcgggccgacgccgttggttttgatcaactctttgaacaatgtgcgctcttgtttattgttaaaaccgtacagcagttgcgcgtcttcacgcaccacaaagtgggtgaaaacgatcgcttcctgacccgcttcagggagttcataaaaacaggtcatcggcatatgcacttcatagcctacgccgcccacttcaattaacaccagcgggggttgtttttcaatgatgatgcctctgagtctgcctatcacatgacgctcctgcgtaatgaatcaaagataatgctgtatgataaaaaaatgctggatagatatccagcgaaggatgaagaaaacttgcgaggtgtctcgatgaactgaaaaatggcacagtataatttattctacaggttatattggaagcaaatattttaatattacatattcagtgaagaaatgcgtaataaaaatatacattgcgcctcctgaaaaaataaattttttatgctattacgtatatttgtatctatttcaatggaatgacaacgtgaatattaattaccctgctgaatatgaaattggagatatcgtctttacatgtataggtgctgccttatttggtcaaataagtgctgcaagtaattgctggagtaatcacgtcgggatcattatcggtcataacggtgaagacttcctggttgcagaaagccgggttccccttagtaccatcaccacgctatctcgttttattaaacgtagctctaatcaacgctatgctataaagcgattagacgctgggctgacagaacgacaaaaacaacgaattgttgaacaggttccctcccggctacgcaaactttaccacaccggttttaaatacgaatctagccgccagttctgtagtaaatttgtttttgatatttataaagaagcgctatgtattccggtgggtgaaatagagacgtttggagaattgttaaatagcaatccgaatgcaaaactcactttctggaaattctggttcctgggttctattccgtgggagcgtaaaaccgtcacgccagccagtttgtggcatcatccgggtttggtgttgattcatgcggagggagtggaaacgcctcagccggaactgaccgaggcggtataacttaacgcagtcgccctctcgccaggttcagccggctttcgctcatctgcatcgcattctgactaacgtggcagtgggtgatagcaatcgccagcgcatcggcggcatccgcctgtggattagcgggcagtttcagcaaggtgcggaccatatgctgcacctggcttttttcggcactgccaatacctaccaccgtttgctttacctgacgtgccgcgtattcaaatactggcaactcctgattcaccgccgccacaatcgccacgccgcgcgcctggcccagtttcagggcactgtcagcgttctttgccataaagacttgttcaatggcgaaataatcaggctggaactgggtgatgatttccgtcacgcccgcatagatgagtttcagacgagacggtaaatcatccactttggtgcggatgcatccgctacccaggtaggacagttgcctacctacctggcggatgacgccgtagccggtcacgcggctacccggatcaatgccgagaataatagccatcacgcgtctccgttttgctgtttagcaggcctcatcagagagtcgctgcgacctcatcagagatttcaccgttatggtaaacttcctgcacgtcgtcgcaatcttccagcatatcgatcagacgcatcagtttcggtgcggtttctgcatccatatcagctttggtagacgggatcatggaaacttccgcgctgtctgctttcagacctgccgcttccagagcgtcgcgcactttacccatttcttcccatgcagtgtagacatcaatcgcgccgtcatcataggtcacaacgtcttcagcacctgcttccagtgctgcttccatgatggtgtcttcatcgcctttctcgaaggagatcacgccttttttgctgaacagataggcaacggaaccatcagtaccgaggttaccgccacatttgctaaatgcatgacgcacttcagcaacggtacggttgcggttgtcagacagacattcaatcatgattgccgtgccgccaggaccgtaaccttcgtagatgatggtttccatgtttgcatcatcatcaccgcccacaccacgtgcaattgcgcggttcagtgtgtcacgggtcatgttgttagacagtgctttatccaccgccgcacgcagacgcgggttagcgtccggatcgccaccgcccagcttagccgcggttaccagctcacgaatgattttagtgaagattttaccgcgcttagcatcctgcgcagctttacgatgtctggtgttggcccatttactatgacctgccataaaaatatctccagatagccctgcctgttcaggcagcgttaattacaaactgttcaatcgcctgccggttgctccaggacttagtgagcgccgccgcagcaggcgcatcaagccacttgtaagccagatgttcagtgaaaacgatctgccgctcgtgcggaagcgcaagacagaaccaactttccgtattacgcgtcacgcccggcgcatagcgatgacgtaaatgactaaaaatttcaaactctaccgtgcgctgacagtcaattaaggtcagttgttcagcgacaacatcaatggtgacctcttcctttacttcgcgcatggcagcttgcggcgcggtttcaccctcttccacgctgccggttacgctctgccagaaatcgggatcgtcacgccgctgcaacatcagcacccgtttcgtatcttgtgcgtagatgaccactaagatgctaacgggacgcttatacactttatccttcacgctgcctcttcgttgactgccttcgctcatcccattcacatagttatctatgctcatgggagttcactcagttgccgcctcgatgcaacgcgaatgatttcgtgtatttgagtcatatcagttattctcagccttcttcacaacctgaatgctcagctcagccagtgcagtcgggttagcaaagctcggtgcttcagtcatcagacacgctgccgccgtggttttcgggaaggcgataacgtcacggatattgtcggtgccggtcagcagcatggtcagacggtcaagaccgaatgccagacctgcgtgcggcggagtaccgtatttcagagcgtcgagcaggaagccgaatttctcgcgctgttcctcttcgttgatacccagaataccaaacaccgtctgctgcatatcaccattatggatacgtacactaccaccgcccacttcgtaaccattgatgaccatatcgtaagcgttcgccaccgcattttccggtgcagctttcagttctgcagccgtcatatctttcggactggtgaacggatggtgcattgccgtcaggccgccttcaccgtcgtcttcaaacatcgggaagtcgataacccacagcggtgcccatttgctttcgtcggtcagaccaaggtctttacccactttcaggcgcagtgcacccatcgcgtcggcaacaattttcttgttgtcggcaccgaagaaaatcatatcgccatcttgcgcggcagtacgatccaggatgtcttcgatgatttctgcattaaggaacttcgctaccgggctgttgataccttccagacctttcgcgcgttcgttaactttgatgtaagccagacctttcgcgccgtagattttaacgaagttaccgtattcgtcgatctgcttacgggtcaggcttgcgccgcccggaacgcgcagagccgctacgcgacctttcggatcgttcgccggacctgcaaatacagcaaactcaacagatttcagcagatcagcaacgtcagtcagttccatcgggttacgcagatccggtttatcagaaccataacggcgttctgcttccgcaaaggtcattaccgggaaatcgcccagatccacacccttcacttccagccacagatgacgcaccagcgcttccatcacttcacgcacttgcggcgcggtcatgaaagaagtttccacatcgatctgagtaaattcaggctgacggtcagcacgcaggtcttcgtcacggaagcatttaacgatctgatagtaacggtcaaaaccggacatcatcagcagctgtttgaacaactgcggggattgcggcagtgcgtagaatttacctttgtgcacacgagaaggcaccaggtagtcacgcgcgccttccggcgtggctttggtcagcatcggagtttcgatgtcgaggaagccgtggtcatccataaaacggcgcaccaggctggtgattttagcgcgggttttcaggcgctgagccatttccggacgacgcaggtcgaggtagcggtatttcagacgcgcttcttcggtgttgacgtggttagagtcaagcggcagaacatctgcgcggttgatgatagtcaggctggacgccagcacttcgatttcgccggtcgccatatcgcggttaatatttttttcgtcacgcgcacgtacggtgcccgtgacctgaatgcagaactcattacgcagttcagaggccagctttaacgcgtccgcacgatccggatcgaaaaatacctgcacgataccttcgcggtcgcgcatatcgatgaagatcaggctaccaagatcacgacgacggttgacccaaccacacagagtcacctgctgccccacgtgggacaaacggagctgtccacaatattctgtacgcatgagatatcccttaacttagctgccggcggatgccccctgctgcgcaggtgaccaagtcgcagcgttagctgtatgtcacaactgaatgaaaaaaggcggctattatactggaaattctgccgcaccgtaagagcctggcccgcgctggaacgcctcgttaccactttatatcgggcctgaaatcagactctacgccagtttgctataaaggtgttgcccgaactcataaaaattaacaaaatttgtcgttccgccatcggctaatcgcattaaggtgtgaggcacgattttgttttttcaggagtcattatgcttgaacttaatgctaaaaccactgcgctggtggtgatcgatttacaagaaggcatcttaccttttgccggtggtccacatactgccgatgaggtagttaatcgcgccgggaagctggcggcgaaatttcgcgccagcggtcagcccgtgtttctggtgcgcgttggctggtctgccgattacgctgaagcattaaaacagccggtcgatgcgcccagtccggctaaagtgttgcccgaaaattggtggcaacatcctgctgcattaggtgcaaccgacagcgatatcgaaatcatcaaacgtcaatggggtgcgttttacggtacggatctggagttgcaattacgccgccgaggtatcgatacaatagtgttatgtgggatcagcaccaatatcggtgttgaatccaccgcccgcaatgcctgggaacttggctttaatctggtgattgccgaagacgcctgtagtgccgccagcgccgagcagcacaataacagtatcaaccatatctacccgcgcatcgcccgtgtgcgtagcgtggaagagatcctcaacgcgttatgatttacatcggtctaccgcaatggagccatcctaaatgggtgcggttggggatcaccagccttgaagagtatgcccgccactttaactgcgtggagggcaacaccacgctttacgccctgccgaaacccgaggttgtcctgcgctggcgtgagcagaccacagatgacttccgcttctgttttaagtttccggcgaccattagccatcaggcagcattacggcattgcgatgatttagtgactgaatttttgacccgcatgagtccgttggctccgcgcattgggcaatactggctgcaactgcctgccacattcggcccacgggagctgcctgcgctttggcattttctcgattctcttcctggcgaatttaattatggcgtggaagtccgccatccacagtttttcgccaaaggagaagaggaacaaacgcttaatcgcggtttacatcagcgcggcgttaatcgggtgattttagacagccgcccggttcatgcagcacgtccacacagtgaagctattcgcgacgctcaacgaaaaaaacctaaagttccggtacatgctgtactgacggcgacaaatccgctgatccgttttatcggtagtgatgatatgacgcaaaaccgggaattatttcaggtctggttacaaaaattagcgcagtggcatcagaccactacgccttatctttttttacatacgccagacattgcccaggcaccggaactggtacataccctgtgggaagacttacgtaaaacgcttccagagatcggagcagttccggctattccacagcaatcttctcttttctgaatttgccacctatcatagacaggtgccatcggccattttaaagggagtttgtatggtaagcgcgctgtacgccgttttaagtgcgttgttattaatgaagttctcttttgatgtcgttcgcctgcgaatgcagtaccgcgttgcctatggcgacggcggttttagcgaactgcaaagcgctattcgcattcatggtaacgcggtggaatatattcccatcgcgattgtgctgatgctgtttatggaaatgaatggcgcagaaacctggatggtgcatatttgcggcatcgttttgcttgctggtcgtctgatgcattattacggttttcatcaccgtctgttccgctggcgacgttccggcatgagcgccacctggtgtgcgctgttgctgatggtgctggcgaatctttggtatatgccctgggagttggttttctccctgcgttaacgcacaatacgccactttctttttcccggatttttacgttatgtctcaccgcgacacgctattttctgcccctatcgccagactgggcgactggacctttgatgaacgggtagctgaagtcttcccggatatgatccagcgttccgtacccggctattccaatattatttccatgattggtatgttagccgagcgcttcgttcaacctggtacgcaggtttacgatctgggttgttctctgggcgcggcgacgctcagcgtgcgtcgcaacattcatcatgataattgcaaaattattgccatcgacaactccccggcgatgattgaacgctgccgtcgtcatattgacgcctataaagcccctacgccagtagacgtcattgaaggtgatattcgcgatatcgccattgaaaacgcaagcatggtggtgctgaattttaccctgcaattcctggaaccttccgagcgccaggcgttactggataaaatttatcaagggctgaaccccggcggcgcgctggtgcttagcgaaaaattcagtttcgaagatgccaaagttggtgaactgttgttcaacatgcaccacgactttaaacgtgccaacggttacagcgaactggagatcagccagaagcgcagcatgctggaaaacgtgatgctgaccgattccgtggaaacccataaagcacgcctgcataacgccggttttgagcatagtgagctgtggttccagtgctttaactttggtagtctggtggcattaaaagcagaggacgctgcatgatcgactttggtaacttttattctctgattgccaaaaatcatcttagtcactggctcgaaacgctgcccgcgcagattgctaactggcagcgcgagcagcagcacgggttgtttaagcagtggagtaatgcggtggagtttctacctgaaattaaaccgtatcgtcttgatttattgcatagcgttacggcagaaagcgaagagccactgagcgcagggcaaattaaacgcattgaaacgctgatgcgcaacctgatgccgtggcgcaaagggccgttcagtctgtatggcgtcaacatcgataccgaatggcgttccgactggaaatgggatcgtgttctgccccatctttctgatttaaccggacgcaccattctggatgtcggctgcggcagcggttatcacatgtggcgcatgattggcgcaggcgcgcacctcgcggtggggatcgaccctacgcaactgtttctgtgccagtttgaagcggtgcgtaaactactgggtaatgatcagcgcgcgcatttgttaccgttaggtattgaacaacttccggcactgaaagcctttgataccgtctttagcatgggcgtgctttaccatcgccgtagtccgctggagcatctatggcagttgaaagatcaactggtcaatgaaggtgaactggtgctggaaacgctggttattgatggtgatgagaacacggtgctggtaccaggcgatcgttacgcgcaaatgcgtaatgtctatttcatcccttccgcgctggcgctgaaaaactggctgaagaagtgtggttttgtagatatccgcattgcggatgtgagcgttaccaccacagaagagcagcgacgcaccgaatggatggttaccgaaagcctggccgatttcctcgacccacatgatccgggtaaaacggtggaaggttatccggcacctaaacgcgcggtgctgattgcgcgcaagccgtaaaggtctggtattactgccggatgcggcgtgaacgccttatccggcctacaaaaccttgctaattcaatatattgcagggactatgtaggcctgataagcatagcgcatcaggcagctttacgtttgcataacctcagcgcccgtttccgggcgctattcacgtcttacgcctgaacagctggctgatcaaacgccgttaacttcggtgcattgcccgtatatttttcgatatacaccaacgcactgttaccggcacaggcatttgccagctggctgctggggatatccgccgttaacacgttcgcactgccgtttttacacaagccattttccagatctggccatgcaccttcatgcacgcataccacgccttttttgatcccgtcagtcaccaccgcgcctgtcaaaatctgaccacgtttgttccagacacgcaccagatcgccattcgcaataccaaagcgtgcagcatcttcggtgtgaatagtgattggttcacgatcggcgatcgcatattttttacgcagttccgcatagttaagctgactgtgtaaacggtgtgccggatgtgcggtcagaagctgtaactgcttctcgtcggcggtacctttccattcatcaggagccagccaggttgggtgtgccgggcaatccttatagccaaatttttccaacgttttactatagatttcaattttgccgcttggcgtacccagcgcatttttcaccggatcggcgcggaaatcaccataacgaacgtactgttcgttcttctcgctgtggcgcatttcgatcagtttattttgctgccagaaggcattaaacattggcatagtgacgcgttgcgcacgggcacctttctgagcggcatcatagaaaaatttcagccacgccatttcatctttaccttcggtatagatctcttttccgccaggtttgagtaattccgcaagatcggcaaacacgtcaaaatcgttacgcgcttcaaattgcggagcaacagcctgcttcatcggcacaatatgctggttgctgtaatcaccggtcatcgtcaagtcattgcgctcaaagcttgtggtgatcggtaatacgatatctgcgtgtttggctgctgcggtccagtagcattcagaaacgacgatcatctccggtttctgccatgctttaatcagacgattagtatcctggtgatgggtaaagttaccgccacccgcccaccagatcattttgatattcggatacgtttgttctttaccgttatgctgatatttgccgccaggattttccagcgcatcgacgatacgggcaacaggaatcgccgtcattccgccatcatcagcggcctcgctggcatgtccggcaatcgccgcagacatttccggcagcacgccgccaacacgcgtcgggttgccaccgttggagtaatgataagagaaaccaaaaccgccgcccggtgtaccaatctgccctaacatcgccgccagcgtcaccagcatccagtgtttctgttcaccatattgctggcgctgaattccccagcctgccatcagcattgtgcgattcgccgccatcagttcagcgagtttgactatctgcgcttccggtacgccagtaatttccgccgcccagaccgcgctcttcggcgtattatcgctcttacctgtcagatactcttcaaactgcggatacccggtagtgtatttttcaaggaacactttatcgtgtttgccttgtgtcatcagggtatgcgcaatccctaacatcagtgccacgtcggtgcccatattcggcgcgatccaggtggcattatcgtcaaagaattcgatggtttcggagcggataggatcaatggcaatcactggtttgccagattttttcagctgatggaagtattccagcccttgctcatcggtactgctccaggcaatttttaaggtattcagcgggttcattccccacagcaccacaacctggctgttttccagaatcagcggccaggaggtctgctgttcatacacctctacagaaccgaccacatgcggcatgatcacctgtgctgccccggtactataatcgccgctatgcccggaataaccgcccgccaggttcatataacgttgcagtaaggtttgcgctttatgcaacacgccagaagagcgccagccgtaagatccggcaaaaatggcgcttggtccgttagctttacgaatacgatcatgttgctcatgaatcagttttaatgcctgttcccagctcacctgtacataggtatcttcgccacgacctttcgccggttgcagtggattatcgagatagctttttctcaccatcggatgctgaatacgcgccgtggtgtgtacctgatccgccgccgtagactgtaaggaattcggtatggttttcgccagcgcgcctgtactagaaacaatcttgccgtccttcacttctacgttcatcgctccccaacgtcccgcggtgaggattttaccgcccttctcttctgcccatgcggggagcggtgctgcgcttgtcaccaccagcgctccagcggcaataccgctgtgtttaataaattcacgtcttgttaatgtcataacttcctccctgatcaacgaggatcactgtttctcggtaatatctttggcgttgtactggaaataccgcgttaaaatgtccagttcgttttcgctcatgctggttcgtgcccccattcctttggcaatggacggccacgcattgacggtgtaatggtcggcggcaataggggcatgacaaccagcgcaataggtatcgtcaagtttttcagcgtattgccatagcggtttacggtccgctaatgcgggatcggtaagcgcaccctgtaaagacgcctgacgccattgattgccgtattcgtcagcctgccattccccgtttacagtgagcgccttgataccttcttcacttaatgtggctagcgccagccgttgacctgccgccaggtagagcgtgttttcactgccctgcatttgataaccctgcaacagaacgatcggctgtttgccactggcatcaacgacggtgagatcggttccaggattcacggtagccagctcgcctatgtgagaagttttgaaaggataaatatgtgcgccattagtaacactagtagcggcctgactttccagctcatgcgccgcgttgtcatccatttttatttctggcggaaaatgggcaatgcctttatgacaatcgatacaggtttcgctgtccttttgtgctttgttatgcattttctgcgcagattcactttggctggcaatatccatggcatcaaaagaatggcaactacggcacgttgcagagtcagtggcttttaattctttccatactgtttcggccatttcctggcgatgagcttcgaacttatcgtcactgtctattttgccgctaacaaattcatgataaatatctttagatgcctttaatttagcaaataaataatccatcccactctttggaatatggcaatcggcacattccgcacgtatccctttctggttgctaaagtggacagttccctgatattcctcaaaaggtttactcatgctgtggcaggaaaggcaaaatgctgtatcgctcgttttatgtaagactttttgcgccagcaataacccgccgccaccaaccacaaccgctatcagcaaaaacaataacccaatgcgttttttccctcgcatagattcctctaattaaattactggacaccgaaatcattgtataattaaatatacaacgaattaaccgcttgcataattaggcacaacactgcctgaaacaatcgataaagaatatgatttattacaatgtaatcattaattgctaaggaataacccagttgctatttagaatatatatttatcagttttagtaatttaaatcccataattaatgtgaatatatacaatatttttagcacaacgctatgcgcactgtcacccgctcaacagatcacggttatcgttcgttttttatactgttcagggataaaaaaaggcccctgttgaaattgcaggggcctggtacgagcaagcatcatattgggcgacatgatgcaacggtaaaaatcatttggcctgatggcgttcaatgattcctttcatttcagcaaccgccgccccgtctacgatataacggctatactcgtccgcgtgttcatcactactcatggacaatccttgattacgataacgcatcggactggcttgccacgctcccgcggagctatggacttccagcactccggcatcgaggaagtggtgcaggttttctgcacggactcctgctccggccataatgattggagcatcacgatgggcaataagttccataattttacttaaaccttgcagtgcgtcacttttttgcccacttgtcagtacccgggcaatgcccaattccgcaagattattgagtgtatataaagggttagcgcacatatcgaaggcgcgatgaaaagtcactgccagcggaccggcagcagccattattttttccattcgtggcatatcgacattcccgtcaacatcgagaacgcccgtcaccagtccaggaaaacctaattcgcggaccgtgcgcacatcctcaagaatggcggcaaactcaccgtcgctgtagcaaaaatcaccaccgcgtgggcgaattatcggatgcacagggatcgtcacccgctggcgcacggatttcagtacacccaagctcggcgttaagcccccctcttttggggctgcgcataattcaactctgtctgcgccgttttgctgcgccgttagtgcacattccatgctgtaacagcaaatttccagtaatgccatttttactccttaattacgcgctctgctcgctggcaacgatctcttcaatggaccacggatgaaacttaatagttgttttgccatcggtgaccgccagcgtcggattcggtaatcgctcatgctcaccttttgggctactggttttcacactgatccccggtaggctgagtccttcatcagaaagcaatgccagcgcacgggcattcagcgtttctggatcacccggcagaacgatttcaatatgttcccaaccttcgtgtgggtaacgtttttccccgggccacggtagctccacaatagaaaactgccagtgcgcaacctgtaccggttcatgcaatttaaacagacaaatcggtctgccattgatcatattttcactcaaaagctcgccacactgttcaaacccgcgacgccagcgttcagcagtggcgttttgatggcaacgcaaagaaatgtgatcggcagtcagcggagtgatattcaaccccagacggcgggaaagttcatctaatgcgtggataaatcgcggtaaatcgcttgcaatatcctgcagctcgtcgatagattgccagttcgccataatcactcttcgtctttcagtaaaagcgttaatttaccctgttgccctgtgccaaccaaccgctgatttcacgccgcttctgatgcaatagtgaaaacggcaatacgccacgcgcacgttgctgacgaaaacagccatttgcagtatactcccgccctaatttctttaactggtgcgggcaatttttgctcgcttcatcaatgtaaggtattccggtgaatattcaggctcttctcagtgaaaaagtccgtcaggccatgattgcggcaggcgcgcctgcggattgcgaaccgcaggttcgtcagagtgcaaaagttcagttcggcgactatcaggctaacggcatgatggcagttgctaaaaaactgggtatggcaccgcgacaattagcagagcaggtgctgactcatctggatcttaacggtatcgccagcaaagttgagatcgccggtccaggctttatcaacattttccttgatccggcattcctggctgaacatgttcagcaggcgctggcgtccgatcgtctcggtgttgctacgccagaaaaacagaccattgtggttgactactctgcgccaaacgtggcgaaagagatgcatgtcggtcacctgcgctctaccattattggtgacgcagcagtgcgtactctggagttcctcggtcacaaagtgattcgcgcaaaccacgtcggcgactggggcactcagttcggtatgctgattgcatggctggaaaagcagcagcaggaaaacgccggtgaaatggagctggctgaccttgaaggtttctaccgcgatgcgaaaaagcattacgatgaagatgaagagttcgccgagcgcgcacgtaactacgtggtaaaactgcaaagcggtgacgaatatttccgcgagatgtggcgcaaactggtcgacatcaccatgacgcagaaccagatcacctacgatcgtctcaacgtgacgctgacccgtgatgacgtgatgggcgaaagcctctacaacccgatgctgccaggaattgtggcggatctcaaagccaaaggtctggcagtagaaagcgaaggggcgaccgtcgtattccttgatgagtttaaaaacaaggaaggcgaaccgatgggcgtgatcattcagaagaaagatggcggctatctctacaccaccactgatatcgcctgtgcgaaatatcgttatgaaacactgcatgccgatcgcgtgctgtattacatcgactcccgtcagcatcaacacctgatgcaggcatgggcgatcgtccgtaaagcaggctatgtaccggaatccgtaccgctggaacaccacatgttcggcatgatgctgggtaaagacggcaaaccgttcaaaacccgcgcgggtggtacagtgaaactggccgatctgctggatgaagccctggaacgtgcacgccgtctggtggcagaaaagaacccggatatgccagccgacgagctggaaaaactggctaacgcggttggtattggtgcggtgaaatatgcggatctctccaaaaaccgcaccacggactacatcttcgactgggacaacatgctggcgtttgagggtaataccgcgccatacatgcagtatgcatacacgcgtgtattgtccgtgttccgtaaagcagaaattgacgaagagcaactggctgcagctccggttatcatccgtgaagatcgtgaagcgcaactggcagctcgcctgctgcagtttgaagaaaccctcaccgtggttgcccgtgaaggcacgccgcatgtaatgtgtgcttacctgtacgatctggccggtctgttctctggcttctacgagcactgcccgatcctcagcgcagaaaacgaagaagtgcgtaacagccgtctaaaactggcacaactgacggcgaagacgctgaagctgggtctggatacgctgggtattgagactgtagagcgtatgtaatcgatttttcgtgagagtgaagcctgatcagggttagccgatcaggcttttttattgccatctaaatgtattctgaaaatggacatgccattgttttctcactgttggataagaggccagaagcgtaatatccggccccagggaaacgataacggttgaatttaaggaataccgcagtgtttaaatttcttgtattaacattaggcattatctcttgccaggcttacgcagaagatacggttatagtaaacgaccatgacattagtgccatcaaagattgttggcaaaaaaatagtgatgatgatactgacgttaacgtgatcaaaagttgcctgcgacaagaatacaatctcgtcgatgcgcaattaaataaagcctatggtgaagcttatcgttatatagaacaagtgccacgcacaggtgtaaaaaaacctgataccgaacaacttaacttgcttaaaaaaagtcagcgagcctggctggattttagggacaaagaatgtgaattaatccttagtaatgaggacgttcaggatttaagtgacccttattctgaaagtgaatggctcagttgtatgatcatacagaccaatacgcgaactcgccagttgcagctataccgtaactctgaagatttttatccaagccctttgacaagaggataattcacatctttttggcatgttttgttgcaagctattcctgataaataattgcaacaagacatcgagcctttttcactgagttattaaacatactcgcgagcgcgtcgctacgctagcaagcaaaaatgaaacaggaataatcgaaatgggatgttgcgcacagtcaaaataactcaccgtaaataatcatctgctataaataatcactttcatgcaataccagataagctatttttaaacagacacttaccgcacaacaaactaattaaatacaaagaaaggcaacaatcaacttaatgttaatgaaatgttttacatatattaaccacttgtttaatgcggagaatcagtacactattttcttataattacatttgaaattatatgatcaccgggagtgattgattaattatctttactaataatcagactaatatttacctgtttgaccgagttgggattgcgtcgtttctccattaggagtaaagctttaatgtcacctgaagttcacagaataaggaacaggttatgagctatagcaatattcttgtcgctgttgcggttacaccggaaagtcagcaactgctggcaaaagcggtatctatcgccaggccagtaaagggacacatcagtttaattactctcgcttccgacccggaaatgtacaatcaattagctgcgccgatgcttgaagatttacgcagcgtgatgcatgaagaaacgcaaagctttcttgataagttaattcaggatgcggggtatcccgttgacaagacgtttattgcctacggtgagttaagcgaacatattctggaagtatgtcacaagcatcatttcgatttggtgatttgcggtaatcacaatcacagtttctttagccgagcatcctgcagcgcgaaaagagttattgccagtagtgaggtcgatgtgctgttagttccacttacgggagattaaccgctcttacgcaagctttggaaaggtagcaactttatcgcgctgctggctttccgcgcttcgcggaactatctgctttaggtcgctaatgaagcactcctgccagtggttaatatcgtttttcacgataacgtccagcatttctgcatgacgggaaatacgttccgccaggctcatagtcaatgcacgatccagcgcagctgcaacttcgtcacgatcgtaggggttaacaattaacgcgctcgttaactcgtttgccgctcccgcaaattggctaagaacaagaacgcccggattggctgggtcctgagcagcaacatactcttttgctaccaggttcatcccgtcacgcagtggcgtcactaagcccacgtcagagtagcggaatattttcatcagtaatttacggtcaaaatgctgattcaaataataaagcggcgtccagcctaattgcccgtatttaccattaattcgtccagcttcattttcgagctgatgacgaatatcctgataggcttgcacatcaccacggctcgttggtgcaatctgggtataacgaattttaccatgatgctgcggatatttttccagcaacgcttcataggcgagaaaacgctctggcaaacctttggaataatccagccgttcgacagaaaagatattttgtacgtttttcagttccgctttaagttgcgccagttttggcggcagtggcccggcagcctgtttggctatttctttcggttcaatgccgatcgggtagacttctgttcgaaatgctttgccccaggctgtatggctttttgcgctacgtgtcgtgacgcgggtcaggttagaaagacaatccaggaacgccagacgatcgttttctgtctggaaacccagcaaatcataatcacaaagctgttcaagcaaggtgtcatatgtcggcagcgcgttgaagatttccggtgtcgggaaaggaatatgcagaaagaaaccaatgcgattattcactccccgtttgcgtaattcatgcgcaaatggcaacaggtgataatcgtggatccagataatgtcatcgtcttgcaacagcggcagtaatttatctgccagcaacgcatttacgcgtagatagccgtcccaggcaggacgctgaaattgcaccagatcgagccgataatgaaaagcgggccagagaacggcattggagaattggttgtagtattcgtcaaggtcctgttcgctgaggttaaaagaggcccacgtaatgttaccttttttcaccttttttagcggctgatcctcattccctgtttcaccactccagccaaaccacagtccgcctgcggctttcagtgcccccagtatgccaacggcaaggccaccggcactggcggcgtgctcgtctggtggtgcaatccggttagatactacgactaaacgactcatagtcatcactcctgttatttttacttagatactacgactaaagctctcatagtcatcactcctgttattttctcttttttgttgtaatgcggtggttatcatttcaagccagctccagacatccggcacacccgccagtcgccaacttgcctgagttgcacctgtgccaatttttacactcattccgcccagtcggttaacgactgcgaagccagattcatcggttaaatcatcgcccagaaatacgggcgttcgcccgataaagggagcttcctgcataaaagctgcaattgcctcacctttactggtacctctcggtttgatctcgacaacacactttccctgctgtaacgccatttgtggccagatctgagtaatacgttgcgctaatgtcattaatgcgtcttcatgctgcggagcctgacgataatgcagcgcaaaagccatccctttcgcctccagctccgcgccgggatactgagcgatgactgtatgcagttgcacgctaatatcacgcgcaatcgcatccggcagatgaacgatatgtgttttaccattgatgtcacggcgctccgccccatgcacgcccgctaacgggaagcgataaggttttgccagtgcgtcaagctccaccatactgcgcccacttatcaatgccaatgcaccatcacttgcggttgccagtagctgtagtccttgcagaatattgtcaggcacgacgacctgatcgggatgcggtttgatttccgccagcgttccatcaagatcaaaaaaccaggcatatttcgcggatagttcaggggtttcggttaacggttctgtcacccggttctcctccttctcttttcttattgtgttgcgcagaacgcgctttacagacatgtaagtatagacagtgtgacgggggtcgccatttgcaacgaagaacagccaaccgttatggcggttggctatggtgggaaaaaacgctaaattgttgcagaaaaaagcatcagacagtgcgtttcgctttttgcttgtaacggtcgaagatcaccgctgccagcaggattaagccgcgaaccacgtactgcgcgaaaggagaaatattaagcaggttcatggcgttttccacggtgcctaaaattaagatacccgccaccacataactgatttttccgatgccacctttcagagaaacgccacctaaaacgcaggcggagataacaatcagctcataaccaatgctcgtcattggctgcccactggtcatacgactagccagaataattccggctatcgcacttaccaggccactgagaacaaagataataattttggtgcgaacaaccggtacacccgccagacgcgcggcctcttcgttcccgccaatcgccagggtgttacgaccaaaggtggttttattcagcagcaaaccaaagataatcagacacgcgacggtgagccagattggcgcaggcagaccgaaccagttggcgtaaccaagggcaaagaagctttcatcttcgataccgaccgctttaccgtcactaatgatgtacgccagacctcgaacaatctgcatcgttgccaatgtcgtgatcagagcatttattttcagtttggcgataacaaagccattgaccaggccacagagaacgcccagcaacaaccccgctgccacgccaatccacaggctttcagtcaggttaataaccaccgccgtggtgacacccgcacaggcaattacggaggcgacagaaaggtcaaagtcaccggaagcgaggcagaacaacatgccacaagccaccatcccgctcatggaaattgccaggcccaaccctttcatattaatgaaggtggcaaaatttgggacaaaaatggcacaggcgataaagagcaccgcaaacaccaccagcatgccgtactgatcccagatacgcccgaagctgaaactgctcttaggtgcgccagacccgcttgtagaaacagaagacatcatactctccttactcaggcaacagcctggctgactttaggcatcgcaaggctcagtgcctgacgctcatctgcctgctcgtgtaacaattcaccggcgatttcaccttcccgcatcaccacaatccggtcggcaacgccgaggacttcaggtaagtcgctggaggcaaacagcaccgccacgccctgcgccgccagcgcataaattacgttatatatttcgtgcttagcgccaacatcaatgccgcgcgtaggttcatccagcaaaatgaccttcatctcttcgcttaaccagcggcccagaatggctttttgctgatttccgccactgagattcatgatcagttgctccgcgcccggcgttttgatgttgaggctacgaatgtggtgatcggcattgttttcttcccaaccgttgttgattacacaaccgccgagcacatgtttacgtctggcactgatgttgatattgtcgcgaacggagtgcacgggaataatgccttccgctttgcgatcttccgggcagagcatcatgcctgcggcaatggcgtggctcggtttacgaatatcgatcggctgttggtcgatataaacctgaccggcggtgatttgcgtcccgccaaacatgcctttcattaattcgctacgccccgcccctaccagaccaaacagcccaacaatttcaccactgcgaaccgccagacttattggcgtacgcacgcctggtgctttcacagcatcaagacgtaggcgctcctcgccataactacgcggttgccagccgtagatatcgccaatgtcgcgcccgaccatcgcctgcaccagcgcgtcgtggtcaacctgctgcatatcggtaaaggttttgacataacgtccatctttaaagacagtaatggcatcgctgagggcaaatatttcttccatacggtgagaaacgtataagattacccgcccctcttttcgcagttcacgaataacgcggaaaagattgtcgatttcacgggcagagagggagctggttggctcatcaaaggcgataattttggcgttacgcgccagcgctttggcgatttcaaccatctgccactgaccaatggagagatatttcagcggcgtgtccgggtcaatatccataccaagatgtttaagttgtaaacccgcctcataattcagcaaactgcgattcacaatgccgcctttatgcggcagctggccgagatagatgttttccgcgacggtcatttccggcacgagatgcagttcctggtaaataatcgccacgcccgcgttaagtgctgcggtcgtgtcggaaaaggacatttcctgcccattaatcactacagaacccgtggttggcgcatagttgccgctgaggatttttaagagagtactttttcctgcgccattttcacccatcaacgcatgaacctgaccggcatagcagtcaaaactaatatccgtcagcgccttaacgccgggaaacgttttaccgatgccgcgaaaactgagatacggggtagactgttgcataacgtctccgtgaatcactggtcgttcacaccccctctgcatcatgcagaggggaatttttccggcaaattacttaccgcctaaaccttttttctccagttcttctttaaagttgtcacgcgtgatcagtaccacgtcggtaacttcggtaaattttggcggttcaacgtcttttgctacccagttgtaaagcatttcgctggatttatagccatgtacgtccgggcttggcagcagggaaccgtagaagccggttgcctgtgctttagacagttcgctcaccgcatccacaccgttaatgccaatgccgatgatatcggccgctttaaagccctgaccttccgtcgcgcgtacgccgcccagcacggtgctgtcgttcataccgacgatcagccaatgtttaacttccggatgttgaaccagcatactgttggcagcgtcaaatgcccccgggatgtcgttagatttggtaggtacctgataaatttgtttttccgggaatccggccgctttcagcgcatccatagatcccgtagtacggcggcgggcggtatccagttcgttggcggtaatcgccatcaccgcgctttctttgacatcccagccacgtttctgcatctctttatacagttcctggccctgacgttcgccaattttagtcgccgccatcatcaccagcggaacggtatccattggcttacctttggcgttaacaaactggtcatccacggcaatgactttcatatcgtagccacgcgctttcgcgacgatggcagagccgagtttggggtccggagtacaaataacgaaaccttttgcgccactggcagccaggctgtcgatcgcgttcaatgttttttcgccatccggcacggcaatcttaataacctcaaaccctaaatccttcccggctttatcggcaaacttccattcggtctggaaccacggctcttccggttgcttcaccagaaaaccgagcttcaggttctccgccatagcggattgactcataacggctgccagaccaatggctgccagggctttagtaaatttgtgcatggttctctccagctttagtgtcgttttgtgtagggcaaaaacgaatgacattcgttaaattaatcggaaaacaaagcattaccttttaactaaaagataagtgactgtgttgacatagttttagcgagaaattaattctccataggagagcaatatcacatcgcagaattacagtgagaacgtgcataaatttagcgggaaaagacataagggaaagccaatttgtcagacaaattgtcgaatgcacagcagattaatccataagattagcctggaaatccttgttgtctttggtacccatgcgggatgtcttctttttaaccagtcaataggccgcattacctggcgttgagtttttgaaatggtgtaataaccgcaactcaaagatgtggaaaatgcacgtcattcatttcgtcattaattatcactgtgctcattaattaacagaacacgtataatgagagccatctcgcaaaaatgaaaaaacgttttataaaatcatcacttcatcatgaattcaaattcattgattaatatcaacaagatacaaaaagcactatcattaaaattcattgcagttacattgatttcatcaatgaaatgtaaaaatatataaacttgatgatttaagcattttcttatacccgttcagacgttattcttatttcagatcatcgtcagaattgactccacgatcacatttcggaccggcagaaaggaattattctgcaaacagtaattatggtgttttgatttatcttgcacctctccacttctggatataaggatattaggtatggcaaccgctggaatgcttctcaaactcaactctcaaatgaaccgcgagttttacgcatccaatctctaccttcacctgagtaactggtgttctgaacagagtctgaacggcaccgccactttccttcgcgcccaggcacagagtaatgtgacccaaatgatgcgcatgtttaactttatgaagagtgtcggcgctacccccatcgttaaagccattgatgttcccggtgaaaaactgaactctctggaagaactgttccaaaaaacgatggaagaatacgagcaacgttctagtacgttggcacagttagccgatgaagcgaaagaactgaatgatgatagtaccgtcaatttcctgcgcgatctggaaaaagaacagcagcatgatggtctgttgctgcaaaccattcttgatgaagtgcgcagtgcgaaacttgcgggtatgtgccctgtgcagaccgaccaacatgttctgaatgtcgtgagtcaccagctgcattgatcatcatcggcgctaatgcattgcgccgatgaaggttttgagaaaccgctgcctcatctgtttgaagcagcggtttttttaatgggattcaccctgtggggtaaacttgagttcaataagcgcgatggctttttggattgcccgcatggtgaccgggtctgcggcggcgggatggttagtaaagtcgatattcttcagctgactggacattttttcacgaacttcaacgggcgcgattacatcgagaacatccagaatttgtttgataaccaactggcaagcaaccacatcagaaaccaattcctgatcggcattcagcggctgggacatcgtaaactcctgatagcattttgaaagccgttatagtagcgacttcacatcttcagcgatagtcacatccaccgtcatcaggacacaaaaaaacctgccggagcaggttttttgttatcggaacatattgcctggcggtacgtctttgaacgtcttgcaatagttattgaacatacttttcaggattttgcgcagtttcatcgcggcactccgaccatttgttatacaggtgttattgtctttgcgcttataatatgacaaccatcacaaaaatcaatctttatgtgatacaaatcacataaatacccctttaatgttataaaaatgataatcaaaaaacagcccccctatttctgacacctacagatggcaagaaatagcgcctgccaggcgtcttttccggccattgtcgcagcactgtaacgcgtaaaatagtgctttctcttactcttctggctggaccatgagacttctgattctgactcttagtttaataacgctggcggggtgtacggttactcgccaagcccatgtgagcgaagttgacgcggcaacaggtattgtacggttagtttatgaccaggcttttttgcagcatgcccataccgatcgttatgtcagtcgcgggatcgccgatcgcgcatgccagcaggaaggctatacccacgcggtcccctttggtcagccagtaggcaactgtagcctttttgcgggttccttatgtttgaatacggaattcactttgagttatcagtgccatcattccgccttccctgtctttctctaaatattttaatcagcgaggggatcttcgctgattaaagaaatagcggtaatgcgttttattcccattcgtatttttaataattgaagtttatattttaccttttgcaaataataaaataacaaattatagtgacgccacagcaacaaatataacctttgtggagcactatcatgctgaaaccagaaatgattgaaaaacttaatgagcagatgaacctggaactgtactctagtctgctttatcagcaaatgagcgcctggtgcagctatcataccttcgaaggtgctgccgcgttcctgcgccgtcacgcccaggaagagatgacgcatatgcagcgtctgtttgattacctgactgataccggcaatttaccgcgtattaataccgttgaatctccgtttgctgaatattccagtcttgatgaattattccaggaaacctataaacacgaacaattaatcacccagaaaattaacgaactggctcatgctgcaatgaccaatcaggactacccaacatttaatttcctgcaatggtatgtttctgagcagcatgaagaagagaaactgttcaaaagcattattgataaattaagcctggcaggcaaaagcggcgaaggtctgtattttatcgacaaagaactctctaccctcgacacacaaaactaatgctctccggcggcaggtttactgccgccgtttcaaatcagtgacggcaaatcttactctgatcggtgctaaaaccgtctttgctaggtataaatttgccttttgctgccagaaacgctaccagctctcccgctgtcatcccttctgcgctgcaggtgtgaaaacgtgcctgttcaccaaaacgcgctttaatcgcagcttccagactggcatgcgtatattgctcgccactttcaatcatcatatttaacacttcatgaccgtgaatagagtccatcgtccctcctcaaaaaaagcctagcgtagcgattgccgcttatgaagactttgcgccagcgcaggactgaatgctttttattgtacatttatatttacaccatatgtaacgtcggtttgacgaagcagccgttatgccttaacctgcgccgcagatatcactcataaagatcgtcaggacagaagaaagcgtgaaaaacagaaccctgggaagtgtttttatcgtggcgggaaccacaattggcgcaggcatgctggcaatgccgctggctgcggccggtgttggttttagcgttacgttaatcttgttgattgggctttgggcgttgatgtgctacacggcgctattactgctggaggtgtaccagcatgttccggcagataccggtctgggcacgctggcaaaacgctatctgggacgctacggtcaatggctgacgggcttcagtatgatgttcttaatgtatgctctgactgcggcatacatcagcggtgccggtgaattgttggcctccagcatcagcgactggacaggtatttctatgagcgcaaccgctggcgtgctgttgttcacttttgttgccggtggcgtggtttgtgtcggaactagtctggtcgatttatttaaccgttttctgttcagcgccaagattatttttctggtggtaatgctggtactactgctgccgcatattcacaaagtgaatcttttaaccctgccgttgcaacaggggctggctctgtctgcaatcccggtgatttttacgagctttggttttcacggtagcgtgccgagtattgtcagctatatggatggcaacattcgtaagctacgctgggtgtttataatcggtagtgcgatccccctggtggcatatattttctggcaggtggcgacgcttggcagcattgatagtacaacctttatgggattgctggctaatcatgctggattaaacgggctgttacaggcgttacgcgaaatggtggcctctccgcatgttgagctggcagtgcatttatttgctgatttagccctcgccacgagttttctcggcgttgcgttaggcttatttgattatctggctgatttatttcagcgtagtaataccgttggtggacggttgcaaactggtgcaattacgtttctgccgccgttggcgtttgcactgttttatccacgaggatttgtgatggcgctgggttacgccggtgtggcgctggcggtactggcattgattatccctagcctgttgacctggcaaagcagaaagcacaatcctcaggcgggttaccgggtcaaaggtggtcgtccggcgctggtggtggtgtttctctgtggtattgctgtgattggcgtgcaatttttgattgcggcagggttgttaccagaagtggggtgatcagatagcctcaaattccttattgggtgccagaattaacgctgacacccaatttggcctcttaatgcaggcagcactgcttaaatttcttaccactaccgcacgggcaaggatcgttacgccccggtttctcttctgctttgatcggttgctgaacagctttttcctgcggatgcgccatccagtacgcatgtagatcaagcgccgccagtcgaatggcatctacgctctcttcaaacgcttctgggctcatcttttctacccgctcgaagttttcctcagtaccgtgcagcgcaatcgcctccagcgctggttttaagctatcgggcaacgtactccagtcagaaagtgccacgccccgcatatagccaaagcaccactcctcaacaatcgtcagctcgctgccatcaacttctcgcaagccgaataacggctcaaactgctccgggaattcgttcagacgctctgcggtatcggccatatgttgaaaagccagattcataaagcgcgtcatctctttctcactcgcccagcgcggcacatagtcagccccaccccacacggcaaccagccactgttccggttcaatctcttgcggagaactcaacaccgccgtcaataaaccgtccagctccgccacatcaaggatggcgtggtcagtgttgtatttggtcagaatatcgtccagccattccaactcactttcgtttaacggtcccgttttcatacgcttttccttgtggatctcaactcgccagcacctatcttacatgccggtccgtatcagagatactttttgagtggctttgctggtgattaaaaattaaggagggtgtaacgacaagttgcaggcacaaaaaaaccacccgaaggtggtttcacgacactgcttattgctttgattttattcttatctttcccatggtacccggagcgggacttgaacccgcacagcgcgaacgccgagggattttaaatcccttgtgtctaccgattccaccatccgggctcgggaagaaagtggaggcgcgttccggagtcgaaccggactagacggatttgcaatccgctacataaccgctttgttaacgcgccaaattcttcaggcctttcagccagacatccgcttgacgccgatgtcttttaaactggagcgggaaacgagactcgaactcgcgaccccgaccttggcaaggtcgtgctctaccaactgagctattcccgcattcatcaagcaatcagttaatcacttgattttattatcgtctggcaatcagtgccgccgttcgatgcgttgcattctacttacctggcgcgatgagtcaacgatatttttcaccacttttgatcgtttgctgaaaattacgccgaaacgatcactgatcaagcaaatctgcacgcgcagcgctcaaatattgcaacatactccacagagtcagtaccgcagccacaaagaaaagtgcaataccggcgtactcaacccaaatgttcggacgccacagcagccatgccaacgccaccatctgggcagtggttttcactttcccaatccaggagacggccacgctactgcgtttacccaactccgccatccattcgcgtagcgcagaaataataatttcacgggcgatcatcgttgccgccggtaatgtcacccaccagctgtgataatgctcggttaccagcaccatggcgatagccacgagaactttatctgccacagggtcaaggaaagcaccaaaccgggtactctggttccagcggcgtgccagaaaaccatcgaaccagtcagtcaccgccgcgacgcagaaaatgagcgcggcggcaaacgggctccaggtgacaggcagataaaagaccaatacaaagaatgggataaggatgacacggaacagtgtaagcaacgtagggatattaaattgcataatgacgggtaactatctgttgtcagtaagattacccctatgttgctacagagacatcaatgtttcaagctccagaagatcttttctgccagaccttggctaatacccggcacttttgcaatttcctcgacgctggcgttacgtaaaccttgcaaaccgcccatatatttcaacaacatttgccgacgttttggcccgacgccttcaatggtttccagggaactggtatttttgaccttcgcccgttttttacggtgcccgccaatcgcgtgatcatgactttcatcgcgaatatgctggataacatgcagcgcgggactatctggcggcaaactaaatccctcaccttccggctcaaagaacagcgtttccagtccagccttacgatctgctcctttggcaacgccaagtagcagcggatgatttttatcccaactgacatccagttcggcgaagacatttttcgcctgcgcaagctggcctttgccgccgtcgataaggatcacatccgggatcttactgtcgtcaatggctttaccataacgccgacgcagcacctgattcatcgccgcataatcatcgcccggcgtgatgcctgtaatgttatagcgccgatactccgcacgcagcgggccgttagcatcaaacaccacacaggaagcgacggtttgttcgcccatggtatggctgatgtcaaagcactccatccgcttcacttccggcaatttcaacacgctggcaagcgcggtcagtcgctggtgaacggtagattgctggctaagtttgctggttaaggccgtcgccgcattggtgcgcgcgagtttcagataacgcgccctatcgccgcgaggtttggtttgaacattaatcttgcgtcccgccagttcactaagggaatcggcgagcagcgttttatcgctaagattaaaatcgagcaggatctcacccggtaaggtgcgcatctggctgccttgtaaatagaactggcctacgaaggtttctaccacctcgctcagttccgtaccgccaggcactttcgggaaatagctgcggctgccgagcactttgccctgacgaatgaacaatacgtggacacaagccatgcccgcatcgaacgccacaccaataacgtcgaggtcgtcgccggtattggaaacgaattgtttttcggtgacgcgtcgcaccgcctgaatttggtcgcgaatacgtgcagcttcttcaaactccagattctggctggcagtttccatacgactaatgagttgcgtaagcacctgatcatctttgccagacaaaaacaggcgcacatactcgacctgctgagcgtattcttcttcactcaccagtccttcaacgcacggtcccagacagcgccctatctggtattgcagacacggacggctgcgattgcgataaacactattttcgcactggcgaatggggaaaatcttttgcagtagcgccagtgtttcacgtacggcatagccattcgggaacgggccgaaatattcacctttggcatgcttcgcaccacgatgcatcgccagacgcgggtgggtatcaccactcaggaagataaaaggataacttttatcatcgcgtagcaaaacgttgtaacgcggctgatagagtttgatgtagttgtgttccagcaacagcgcttcggtttctgtgtgagtaaccgttacatcaatttgctggatctgggcgaccagcgcttcggttttgcggctagcgaggttgctacggaaatagctggaaagccgttttttcaggtctttcgctttgccgacatagataaccgtaccaccagcatcgtacatgcgataaacgcctggctggctggttacggtttttaaaaacgcttttgcgtcaaactgatcactcactgactacttaatgtctccgcattacacagaccatggcgaattgccaggtgagtcagctcaacatcgccatgaatgtttagtttactgaacatacgatagcggtagctgttcaccgttttcggactgagattgagctgttcactgatctcattgaccttctggcccttggtgatcatcagcataatctgcaattcacgttcagacaaactggcaaatgggctttctgttttttctggttcgatctggcttaacgccatttgttgagcgatgtcagaagcaatgtaacgctgcccactatagacagaacgaatcgcactcacgacttcctgcggagccgcgcctttgctgaggtagcccgcagcaccggcctgcatgactttcgctggtaaagggttttctgtatggacggtaagcatgatgattttgacatcagctgtggaacgcgcgattttacgcgtcgcctcaagaccgccaatgcccggcatactcatgtccattagcaccacgtcaacggcatttgtccggcaccacttaacggcgtcttcaccgcagcttgcctcaccgacgacttttataccctttatatcttccagaatgcgtcgtatccctgcgcgcaccagttcgtggtcatcaacaagtagaacgttgatcaaaggaatatctccagaaatagggataacgctactgatagttagtcattcgtatattagcggtttttattgcaactttgaaacgttaaaaatggtgggtattcgatttttctctcgtttttgtcaattcgattgtccacagttatggtcacgcccgtcaccaacggcttaccggatcgtttcacagtaagccctacgatgaaatgtgacaaaaattgactttattcagcaaaaatgaaaatcagcccgctgaatatgtaacattaattaacccgaacaatacgggcaaaaaacattcatgataaaaatatttattggtcattatattaacgtattttatagcactgccgatatcacgctcaaaaaacaaccactgctatttttagcaaagcttatggtatactccgccgccttaacatttttcaccgcaaattttcattgcaacatgacgaggaaaataaatgagtacgcctgatttttctactgccgagaataatcaagaactggcaaatgaagtctcctgcctgaaagcgatgctgacgctgatgctgcaggcgatgggacaagctgacgcgggccgcgtgatgttaaagatggaaaaacagcttgcgctgatcgaagacgaaacccaggctgcagtattttccaaaacggttaagcaaattaaacaagcctaccgtcagtaatataaaaccggctgatagcgtgcctttcagccggtttttgcatctggcacgcaggacagaaaagagatcaaattaagccagtagcggccgcgtaacaggcaacctgggtcttatttggtgcattaatttttttctgcatgtttttctggtggaaattgaccgtattctcagagatactcaaaatcatcgctatctctgcacttgttttcccttccgccgtccacctcagaatttctttttcgcgcttgctgaaattcatctctggcgtcatcactatttcatcatttaaacgcatcagagccatcagactttcgcgcaccagtaactgcatttttaattgcagttcatcactaagaatgggtatttcgcgcgcgctgcaacgggaaaaggacaaaaagcccagcgcccggtttggcagcattaaatactgagtgacaccgcggcgtaaaccatgtgcgcgcgcggcttcccataacggctgtgcttcgctgaataagtcatcattccacattaaatggccctgactaaagttttcagggttcagcaccggatcaattgcgagaaagttttttgcctgataataactaacccacgcctcagggtaattggtgtaaaaagccactttaggtcgagtgaatggtaccgggtggcggacacataagctatagtaatcgtactccagctgctgagcctgaagctcaatttcatggtagacctcttctgcggtctccatcctctgaaaacgcaacagcatcgtgcgacgccagctgaaaaaatccttatcctgcatagtaaaccgcaacgcccttgagagtgagtatcatttataatgataattcaaactatcacataaataagatttatatataatttatattattcaggcaatgaattacttttgcaagccatcgcattctcttatgttattaatgagttatgctgatttgttaagcagttttatcaggcttgaaatggcgtccagccccgacaggtgaatcgtcggggctgattttttcttattattgcagcagaaacttctcgaggaactggcgggtgcgaggctgctcggttccgtaacgtttatcatgttatcctaaggattatccgaaaaataatacctacgaacatcttccaggatactcctgcagcgaaatatttgttttaagctcactcacatatcgcaacatttactttactttaagacaattccaggcaaattatacaacactttacgggatagtaagtccgcctgaaaaatcgcgagagtggcgcattaggtgacccatgttgttccgtttagtcatgatgaaatattcaggtaaggggaattatcgttacgcattgagtgagggtatgccatgagtacgattattatggatttatgtagttacacccgactaggtttaaccgggtatctgttgagtagaggggttaaaaaaagagaaatcaacgacattgaaaccgttgatgaccttgccatagcttgtgatagtcagcgccctagtgtggtgtttattaatgaggactgtttcatccacgatgcttctaacagtcagcgtatcaagctcatcattaatcaacatcccaatacgttatttatcgtttttatggcaattgccaatgttcattttgatgaatatctattggtcagaaaaaatttattgatcagttctaaaagcattaaaccggaatctctcgacgatatccttggcgatattctgaaaaaagagacaacgataaccagctttttaaatatgccgacgttaagtttgagccgaaccgaaagcagtatgttgcgaatgtggatggcaggtcagggaaccattcaaatctctgaccaaatgaatatcaaagccaagaccgttagtagccataaaggtaatattaaacgtaagatcaaaacgcataataaacaggttatctaccatgtcgtccgactgacggataatgtgactaatggtatttttgtcaacatgcgctaacacattctgactggtggtttcccaccagtcaggctgaataagattactctgctttctccacaaagataccgtcctgatgccctgcttcattaaagaaccagatgccgagcgggtagtcttccaggctaaccaggtacattgtgccttcactaaactcctcaactgccagtaccacgccaggacgacgcggaccgccatccgttttgactgttacccgatcattcaccttcatcgttttcctcctgtggctttgtgccagtgtagaacaatttcgtttttctggcagcgccaggcgcgcgcgagtgctgattttctcgacggtctatacttaagagatgccaggcggacttaacgactggcggcaacaacagagtaacggttgcgaggaaagatgatgaaaaccgcaaaagagtacagcgataccgcaaaacgtgaggtcagcgtcgatgtcgatgccctgctggcggcgatcaatgaaattagcgaaagcgaagttcatcgcagccagaacgattctgaacacgttagcgtcgatggacgtgaatatcatacatggcgtgaattggcggatgccttcgaactggatattcatgacttcagcgtctctgaagtgaatcgttgaatgcacaataaaaaaatcccgaccctgagggggtcgggatgaaacttgcttaagcaagaagcacttaaaaaattcgttacaccaggaaatctgatgtgttcatcaccttatccgcaatttttttcgctgacaagaaaatattcgccatatgaatgattaacgctacttatgaatagaaatgtgacgcacgtcaccccttggtggctctggcgtcagcgggatcgctcccgaaaaaatcatctttgataatttgtgcggttttgagaatcatcctggtaagaggagtactgcgcgactatgtttagtattcaacaaccactactggtttttagcgatcttgatggcaccctgctggacagtcatagttatgactggcaaccggcagccccctggctcacccgtttacgcgaagcaaatgttcccgtcattctctgtagcagtaaaacaagtgcggaaatgctgtacttgcaaaaaacgttggggctacaaggtttaccgctgattgccgaaaatggcgcagtgatccagcttgctgagcaatggcaggagatagacggttttccacgcatcatcagtggtattagccatggcgaaatcagcctggttttaaatacgctacgcgagaaagaacattttaaattcacgacttttgatgatgtcgacgatgcaaccatcgccgaatggacgggattaagccgtagccaggcggcgctgacgcagcttcatgaggcgagcgtaacgctaatctggcgcgacagtgacgagcgtatggcacaatttaccgctcgtctgaacgaactgggcttacagtttatgcagggtgcgcgcttctggcacgtactggatgcttctgccggaaaagatcaggctgccaactggattatcgcgacctatcaacaattgagtggcaaacgcccaaccacacttggcctgggcgatgggccaaacgatgcgcccttactggaggtaatggattacgcggtgattgtgaaagggctaaatcgtgaaggggtgcatctgcatgatgaggatccggcccgcgtctggcgaacgcagcgtgaaggaccggaaggatggcgtgaagggctggaccattttttctccgcccgttaagcgttatcgctcgcgaatacccgattacgcccagcctgtttagcgagataaagccgacggtcggccagactctggagttgttcaaaatcataatcaccggtttcctcgctgctgcttacccccaggctggcactgatgcgtatcgtcgtactcttggcgatcaacatctctttttcatttaatttcagtcgaatacgttctgcgacctccgcagcctccgtcagactcgcgcctggcagaatcacacaaaactcctcaccaccgacccgcccggcaacgtcctgcgcacgcaaggaactgctaattaatccggcagcatgagaaagaacacggtcgcccgcctgatgaccaaagcggtcattaatcgctttaaaatggtcaagatcgacctgaatgacagaaaaaggatgttggtgcgtctgacacaatttagcgagcggacgggctttttcgaacagtgcgccacggttatataaacgcgttaaggtgtcgtgccacgcctgccactgcaagctgctttgcagaacatacatgttgctaaccatccggcgaatcacataccaggagatgagtaacatggtggtaaagagcgcccacagcagggttaatgcaatgctgatactgccgaaatcgccgcgcacgccttcgcttaacgtatggacacgcaccagcacaccgtcgaaatggtccagacgttcccagctaacatagcgactgtccatacgaatgccgccccgcgtgtcatgttccattgcctgcgccagcaaggccagttcacgaggatcaaaaatattccctgttggatggtcaggattggaagaggtcaaaaatctcagcttactgtcatagagctgatactcaccatcgaggtttttatcgatggcgtttcttaaaaattgctgcatagtacgcacgggaatactcatccccagcacgccataccagtagttattactgtctaccggaacactgacggtaacctgcggttcagtattgctggcgtgttccggttggctagtgaaccagcgtaccgcgcggtgacgattttctcgttgactatggccaataaaccagggttgggtgacatagccgtaataacgcgttggaacattgcgcgtaaacaaggtcggctgcgtgctaacgtaaaatccggcacggctgacatacatcgcctgttcaaccatgctgctggagttgtgcgctagtcgcagcaagtaaccaacttccagtgcagcggtaatttcattgtcgaggctttcattttcgcgagacaggagattcccctcgctgactaatgcatcgctcacaccattaactggcagagtgcgtcgtcggttgagttcgattttccaggcgtgctcgtcgcgatgctgttcgaactcggttacagcatcacgcagagaggtgaaatccagtggcgctacgagagcttcgcgcatgccattacgtaaaaagatcagtttgtcgacgttatactgcaaatgcttatcgagcgcgttggcaacgttttccagatgattacgctggctggagatataggcatcttccagcaccaccacttcacgccaggtgagcaaggtggaaaaaagcaataccacgataaagcagagattaacgacatgaccaggccccaggcggcgtgcgagttttttcaaccagctctggttttccatttttgtctcgtgctgcaccctgacgactcccaacctgcttttttatgattctggcataacctggcgatagcgtaccgcaaaacagcgataattttataatggtggcatgataagacgcgactatcattcattgcaggcattagcacaccaggccggatgtgatccggcctgatgttaatgataccctttcacacttcttccgcagaacgactcccctcccccggaacaagctcggtttcatgaaaagcttcccgcttgaccccgtaaccgtcataccaacgacactcaaccataccgctggagtatccagtgacaatcatccgcgggccgccctctttaaccgtaacttcctcactaaccataaagctcatactcgcctccttttttcgagtgaaacttgttcaccttagttgaagatggcgaattttgcataatagccagtgcgagtattaatgtgcctgaccgcgcattttctctacggctttcactcccagcaccacgatgccgccgatgataaatccaagaatcagatttaaaacagtcggtaatatcatcgccactactgcactttgctgcccggcgaaatgttcaatggcgtgatgcagcggcgcaattccatgtaccacaatcccaccgccgacgaggaacatcgccagcgtgccgacaatgcttaacgctttcatcagccagggcgcgataatcaataaccctttacctaatgcctgcatcagcgcgctggatttttccgccagccaataccccaggtcatcaatcttaacgataacccctaccagaccgtagacgcccacggtcactaccagcgcgatgccactaagcaccagcacctgattaagcaacggcgcttcggccacaatccccagcgtgatggcgacgatttccgcagacaatataaaatcggtacgaatcgccccttttattttgtccttttcaaacttcagcggatcctgcgccgccagcttctccagacgctgctggctctgcgccggatcttctttatgtttacgcgcctccagcatatgcagcactttctctactccttcaaagcagagaaacgcgccaccaatcatcaacagaggcgtaatcgcccacgggataaacgcactgatgatcagcgccagcggcaccagaatcactttattaatcaggcttcctttcgccacgccccagaccacgggaagttcccggttggcccgcacgccactaacttgttgcgcattgaggcttaagtcatcccctaatacaccggcggttttcttcgccgccagtttgcccatcacggagatatcgtccagtagtgtggcgatatcatcgagcaacgtcagtaaactactcccggccaaaagcattccctctcatttttattgttgaagggtgtaagtatgaagcaaaaacggcagctctgatacttgcttcacaggtcaacatttttttaacaatcaagtgcaattatatctctcgccagcagaatgattttcacgtttactatgaaccacctttttatttccaccgtgagggattatgcgtttccgccagttgttaccgctttttggcgcgctgtttgcgttgtatatcatttggggcagtacctattttgtcattcggattggcgtggaaagctggcctccgttaatgatggcgggcgttcgattcctggcagccggtattttattgctggcatttttgctactgcgcggacacaaactccccccgctacgtccgctgctcaatgccgcgctgattggcctgttattgctggctgtcggtaatggcatggtgacggttgccgaacatcaaaatgttccttccggcatcgccgccgtagtggttgcaaccgtgcccctctttaccctgtgcttcagccgcctgtttggcattaaaacgcgcaaactggaatgggtgggtattgccattgggcttgccggaatcatcatgctcaatagcggtggaaatttaagcggcaatccgtggggcgcgattctgattttaatcggcagcattagctgggcgtttggcagtgtttatggcagccgcattaccttacctgtagggatgatggcgggtgcgattgagatgctggcggcaggcgtggtgttaatgatcgcgagcatgattgcgggtgaaaaactgacggcgctcccttcccttagtggcttccttgcggtcggctatctggcgctgtttggtagcattatcgccatcaacgcttatatgtatttaatccgtaatgtcagtccggctctcgccaccagctacgcttacgttaacccggtggtcgcggtcttgctgggtacgggactgggtggagaaacactgagcaagattgaatggctggcgctcggcgtaattgtcttcgcggtggtactggtcacgttgggaaaatatctcttcccggcaaaacccgtagttgcgccagttattcaggacgcaagtagcgagtaatcaagcgagtaaatgaatcccctgcgtgtcgatctgcgcgctggcaccttcgccgcagatccactcttccagacgctcggtaagcgcttcatccgtcagcttctcgcgcccacgtaacgcgcactcccagacaatcaatacgcgccagccgagttcctgcaagcgactgatatcgcggcgatcgcgctcaacatttttacctatcttctccagccagaactcggttcgagtcgcaggcactttaaacagatagcagtgatgatgatgccagaagcagccatgggtaaatatcacgcagcgatattcatcaacgacaaaatccggacgtccgggcagactggcgtcctgaacgcgaaatgccaggccctgcccggttaacagactggcgaggcgcttctctatcgccgtatcacgcgtggcaatcgcgcgcatatttttgctgcgagtggccttatcgtgaacgtcggccatgttgtgcctcttgctgacgcttagttatcgactacgtcggccatgttgtgcctcttgctgacgcaacgccaccgcctgtttgatttttggctcaagcagttttgccaccgcggcaaagaccggcacgaccacgctgttaccgaactggcgataggcctgagtgtcgctaaccggaatacggaatttcgcttctcccggcgcttcaaaacccattaagcgcgcgcattcccgaggcgttaaccgacgtggacgatgttgctgattcagcggatcgtcaaagtctttctcacccgtggccatatcccagccgcgatcgattaaaatttccgcgccatctttgtaataacgcgcagacagcgtacgcgtgacgctttgcggattgttcggataaaccattccataaccgaagccgttaccgcgcgcctgatgttttttcgcatatcgatagaggtacttccacagcaccggcgtcaggatatatttcgcctcgaccatcgggtccaacagctgcgccagcgtcactcgctgcgcagggaaacattcgctgatatcacgcagggtaaaatcggctttcagattcagatcgcgacgaaaacccaccagcacgatgcgttcacggtgctgcggcagaaaatgtttgccgtcgatgattttcggatcgtctggcccattatcttctgcatcagccacgtcatagcccagttcgtccagcgtctgcatgatgatgcggaacgttttaccctggtcgtgacttttcaggtttttgacgttttcgagcacaaacatcgccggacgacgcgcgtcgataatgcgtaccacatcaaaaaacagcgtgccctgggtatcgcaggcaaaaccgtgcgcccgcccgaggctgttctttttgcttacgccagccaggctaaatggctgacaagggaaaccggccagtaaaacatcgtgttcaggaatgtgttgacgaatatgttccgccgccgcctcatcactcacgccttctttatggctgagggtgatgtcgcggatatcttcattaaaatgatgcgtcgccggatcgcaataatggttggctttataagtgcgtaccgcatgtttgttccattcgctggtaaacacgcactgtccgccaatgctttcaaaaccgcgacggatgccgccaattccggcgaatagatcgataaagcgaaacgcataatgcggatgatgtgccggtggtttgggtaataacgtttgcagatgggcgaactctttctcacttaaacggtgccatgcgctgtcattcgccagcgcacgttttaaaattgccgcgctccagtgattctcacctacaccattaagctgcgccaccaacgttttaacatcataaatttgcagcagtttctccagcattgcctgtgcggcattcccggtgctgtaactatcggttacacttatattttcctgcatagatttcaccggccatctgagatggccgacaggttaacataattacagccatttagggccacgcgctcagccagcggaactaaacgcatctatcaccttgtgatcgacaccttcattctcccccgccagttcggcactgagcttcgccataaactcgactaaaaaatgcgcgttgtgctgcgccagctgcttgcctcttgcggtttgcatggtttgcggtagcttcagcaacttagtctggaaatgatccagcgcgtagcgtttatcatcaagcgggcgatgctgtgcgaacggatcttcaccatcaaacagcgccacgcccaatgccccactaacggcaaacacgcgcgccaggccaatcgcccccagggcttccagccgatccgcatcctggacaattttagcttccgttgttaagggggcgatttgcgcgctgaaactgtgagcggcaatggcatgacaaacggcctcgattttctccgccggaaattgctcgaactcttcacggagcaggcgacgcgtctcttctgccgccaggatactagaacgctgcctttgcggatgatttttcgccaggctcacaatatcgtgaaaataacaggcggttaaaatcaccagcatatcgacatcgtcatctgccgccagcttctgtgccgtagcccagacgcggcgaaaatgacacacgtcatgggccgcgtcctggtgctgatgatggtttttcaaccagttttcgaactgtgcctgccagtgttgtaagtccatacgcgctccgttgccaaagagtcgccaccttagcagtttttattcatagcgtctgctacgtgcgggacgaggtcgggtgtaccaggcaatgctgcctaacaatgccccgaccagagccataaataaaaatccgaccagtgcccctaaccactttcccgcggtagagcctaaatcgctttcaaatccgctcacgggggcatcgggaatccggctcatcacccagatgtaacgcgccattgcccagacgaaatagccacaccatgtatagaaagcccacaaagccagtttgccgccagggctgcgagagagtctctcttccatctttgtgctaccgtattccattttgagataacccggaaaattcagacttagtactattatgtgataaaagtcacatttttccacattggatgagccagtcaagactcaatcattttttgaacaaatagataaattttgcgcaacggcagtgaatacaggaaaaatcgttttgagcgattttatttatctttgatatcggctttattaattcatttaatcaatatattagcactgattacaattatacctttttattattctgtgtcatgatgcttccgttattagccttttatcgtcttgtttatattttttgggccggcatgatgccggcttttttttatgccttcattaatgtgcgcctgatcacaccagccgtttggcgcaacaatcattgataccccctatgtttccgctcaactcataacatattgatatacatttataattttcatgaatatttatatttagaattcataattatgaattatattaaatagattagaaacattttgatatcttttaaatacatttgttacatgtaatccttaaaataaaatgaacttcatagaatagtatccaaatgtgcttttttttggataacggcacttattgatatattcatgaagattataatcacaagggaatacataatgaaaagaaaagttctggcaatgctggtcccggcgttattagttgctggcgcagcaaatgcggctgaagtctataataaagatggtaataaactggatttgtacggaaaagtagtgggtctgcactacttctctgatgattctggcagcgatggcgacatgtcatatgcccgtatcggtttcaaaggtgaaactcagatcgctgatcaattcactggttatggtcagtgggaatttaacattggcgcaaacggtcctgaaagcgacaagggtaataccgcaacgcgtctggcatttgcaggtttaggctttggtcagaatggtactttcgactatggtcgtaactacggtgtcgtatatgacgtagaagcatggaccgatatgctgccagaatttggtggcgatacctatgctggcgctgacaacttcatgaacggtcgtgctaatggtgttgcaacctaccgtaacaatggcttctttggttaggtcgatggcttgaactttgctttgcaatatcagggtaataatgaaagtggtggaccattcgggcaggaaggttccggtagtggtgatggccgtagcctttccaaagaaaatggtgatggtttcggtatgtcaacatcctacgacttcgacttcggtttaagtctgggtgctgcatatcaaactctgatcgttcagatcgtcaggttggagttggtttaaatgatcgtaaccatagcaacagaaatgctggtggtgaaaccgctgaagcatggactgttggtgcaaaatatgatgctaataatgtgtatttagcagctatgtacgctgaaactcgcaatatgaccccatatggtggtggcgagtttgataatggtgaatcaagatcagccatcgctaacaaaacccaaaactttgaagttgttgctcagtatcagttcgactttggcctgcgcccgtccatcgcttacctgcaatctaaaggtaaggatttaggcggttgggctcatgacggcaacggcgacccacgttacaccaataaagatctggttaaatacgttgatattggtgcgacctactacttcaacaaaaacatgtccacctatgttgattacaaaatcaacctgctggacaacgacgatgacttctacgaagcaaacggcatcgctaccgatgatatcgttgctgtgggcttagtctaccagttctaatcagtcaactcgctgcggcgtgttactgtaaaactgaacactagcctgagttcgtccctcatcgaactcaggcttttttattggcatttcatctccatctgcggcacacgcaattgccgaagcatatcgatacagcaccttaccctgcccctcctggcacaataacatcaaccagctactcttcaagctaacacccaaatgcatttctttatgaattaatccgtaacaaacacgcttcccatatagaaatatttgcaaaaatagtgcatgaaataagctttttctctaccaatccgggatataaatattcatcagcaccacaatattccacagcactaaatctctccccgccaccccgtacctctgataatggtctaaaatcattgaagccacttgcgacgacgttgctcaataaggaaaatttggcgtgaataatattcaacaccagtgcagcatcatcattacatacttacagccgccgactaccgctttcgatatattgactcaattttccagcctggttaaaaatagcgaccagctcagtcgcaaatatagtgactaccctaactaagcaacaataaggaatacactatgactgttcaaacaagtaaaaatccgcaggtcgatattgctgaagataatgcattcttccctagtgaatatagccttagccaatataccagtcctgtctctgatcttgatggcgtggactatccaaaaccttatcgcggtaaacataaaattctggtgatcgccgcggacgaacgttatttgccgaccgataacggaaaactgttcagcaccggtaaccatccgattgaaacgttgctgccgttgtatcatctccatgctgcaggtttcgaattcgaagtggcgaccatttccggtctgatgaccaagtttgaatactgggctatgccgcacaaagatgaaaaagtaatgccattctttgagcagcataaaagcttgttccgcaatccgaagaaactcgcggatgttgttgccagcctcaacgctgatagcgaatatgcagcaatctttgttcctggtggtcatggcgcacttattggtttacctgaaagccaggacgtggctgccgctttacagtgggcaatcaaaaatgaccgttttgttatctccctttgccacggcccggcggcttttctggcgcttcgccacggcgataacccactgaatggttattccatttgcgcattcccagacgccgcagacaaacaaacgccagagattggctatatgccgggtcatctcacctggtacttcggcgaagaactgaagaaaatgggcatgaatatcattaatgacgacatcaccgggcgagtacataaggaccgtaaacttctcaccggcgacagtccttttgcagcgaatgcgttgggtaaactggcggcgcaggaaatgctggcagcttacgcgggttaatccctgttacgtttgaatgtaagcgcataatcaatcgcggccgcgttagtactcacgacgtggctgcgttttttcacggttaatttatggcgtactgaagccctatgttaatttctttgcggtaacgtaatccggaacacattatgcttattgagatagtgatacgtagcacttcccccatgcaattcggcaatcgctttgactaaagaaaggcctagtccctgacctacggaatgacggctattatctccccgccaaaatctacggaagagtttttcaggctcattaattttcgttccagggctggcgatatcaatattaagatagctgttggtatcaagaaaactggttatatgaatacggcttttttctgggctatatctaatggcattaacaataagattgcttaacattcgttgtagtaaaattttatccgcaaagatttgctgattgcactcgaccttaaagcaaatctctttctcgtcactaaggtattcaagatagtccaacaaattttcgacttccttattgagagaaaggctgtccagtttcaccaaaacattgtttttatctgccctggcaagaaacagtatgttctctgttaaccggctaatattttccagctcttcaatgtttccggcaattgttttttgatattcagcgatacttctggtttgactgagcgtaacctgattctgacccagtaatgcattaattggcgttctaagttcatgagcgagatcgtcagcaaactgacttagacgctcaaaatctttgactaaagcatgatgcattttattcaacgcctgcccaagaggttttagttctctcggtaatgcgctaacctcaacaggctctcggctatcgttataattcagcgcttccgttacaccactcaactttttgatctctcgtaatcccgttctgattaacagcggacttaatacactgcaaagtacaatggcgacaatgcaaattataatgctattaattttatactgttcaagcatgttatgtctggcactagccaatttagccacagtaaccgttaaacttgggctaacttcatcaatattaattcgtaaagcatctatctctgtatcattaataatgcttctgtaaatgccagctgcgctgattgtctcactagcaggtatgttatttaacatgccatcactgacatttgtccggttaacaattttattgatgctatcaccatgaataatcaagatatcctgactaacatccatcatccggttaaagtacacaggtaacgtatctggatttaccccatcaattaacaactgcttgatctgcgctgtccggttaatgagtgttgtatcatcgcgccatttcaactcacttgccaggccattatagagagtccagacaattccggcgccagcaacagacagtagcaatataaaaagcaaggttaaacggacggttatagatagtcttttcattatttttttaccgctacgaaactatagcccatcccccggattgtggcaattagcttttcaggaaaaggatcatcaacttttgcgcggagcctgcgaatggcgacgtccaccgtattggtatcactatcaaagttgattccccaaatttcactcgcaataaccgttctgggtataatttcgccagctctggaggccagtagccaaagtaactgaaactccttgcgcgtcagtgtaatactgatattgtccctgctcacactatgactaacagagtccattcttaagccgctgatttctaatgtactattcaaagcgtgatgttgccttaattgtgcccgaacccttgccagcaactcagaaaaactaaaaggttttaccagataatcatttgccccactgtccagccctctgactctgtcatcgacagaatcccttgcagtaaggcaaataacaggggtttgctttgctgttcttaacgtttgtaagatctgccagccatccatacccggaagcataatatccagaatgatcaatgcataatcatccttcagcgcaagataaagcccatctctgccatcagaaacggcatcgatgacataacccgcttcggaaagcccctgcgttacccattcctgggtcctttgattatcttcaataagtagaatcttcatgaaaataatatgccataaatcatatgttatagaaacagcctggttcattacaaaattgtaatgctgctgtaaggttaccctggacgctttttcgctatcctcaaaactcattcacatgacaaggatataaacatgttaaagcgttatttagtactcagcgtagcaacggcagcatttagtttaccttctttggttaatgccgcacaacaaaacattcttagcgtgcacattttgaaccagcaaacaggaaaacccgctgctgacgtgacagtcactcttgaaaagaaggcggataacggctggttacaacttaataccgccaaaacagataaggatggacgaattaaggcactgtggcccgagcaaactgcaactacgggcgattaccgtgtcgtatttaaaaccggggactatttcaagaaacaaaatcttgaaagtttcttccctgagatccccgttgaatttcatattaataaagtgaacgagcattatcatgtgcctttattacttagccaatatgggtatagtacctatcgtggcagttaatgcataaatatgtaaaagcagatctctgctactgttagggaggacactccctgacagattaacagtaaacggctcttgctggctaacgacaaaaaagtgtgatggcttatgaaaaagaatcaatttttaaaagaaagtgatgttacggccgagagcgtattctttatgaagcgtcggcaggtgttaaaagcactgggcatcagtgcaactgcactttctttgcctcacgctgcgcatgccgatctgcttagctggtttaaagggaacgatcgcccgcccgcccccgccggaaaagcgctggagttcagcaagcctgccgcctggcaaaataacctgccactgacgccagcagataaagtttccggttataataacttctatgaattcgggctggataaagccgatcccgccgctaatgctggtagcctgaaaaccgatccatggacactgaaaatcagcggcgaagtggcaaaaccattgaccctcgatcatgatgacttaacccgtcgcttcccgctggaagagcgtatttatcgtatgcgctgcgtggaagcgtggagcatggtggtgccgtggattggttttccgctgcacaaattgctggcgcttgccgaacctaccagcaatgcgaagtatgtcgctttcgaaacaatttatgcaccggaacagatgccaggccagcaggaccgctttatcggcggtgggctgaaatatccttatgtcgaaggattgcgtctcgacgaagcaatgcatccgctcacactgatgaccgtaggtgtttatggcaaggcgttaccgccacaaaatggcgcgccggtgcgactgattgtgccgtggaaatatggctttaaagggattaaaagcatagtcagtattaagctgacccgcgagcgtccgccaaccacctggaatctggcagcgcctgacgaatacggtttttacgccaacgttaatccgtatgttgatcacccgcgctggagtcaggctaccgaacgatttattggtagtggcggcatcctcgatgtacagcgccagccaacgctactgtttaatggttacgccgcccaggtggcaagcctgtatcgtggcctggatttgcgggagaatttctaaatgcgtctgacagcaaaacaggtgacatggctgaaagtttgcctgcatcttgccggattgttgccgtttctctggctggtctgggcgatcaatcacggtggactgggtgccgatccggtgaaagatattcagcattttactggtcgcactgcactgaaatttttgctggcgaccttgttaatcacccctctggcacgctacgcaaaacagccgttattgatacgcactcgccgcctgttaggattatggtgctttgcctgggcgacactgcatttaacaagttacgcattgctggagctgggcgtgaataatctggcgttattaggtaaggagttaattacccggccttatttaacgttaggtattatcagctgggtaattttgcttgctttagcgttcactagtacccaggcgatgcagcgaaaactcggcaagcactggcaacagttgcataatttcgtctatcttgtcgcgattctggccccaatacattatctgtggtccgtgaagattattagtccgcagccgctcatctacgctgggctggctgtactgcttttagccttacggtataagaagttgcgttccctttttaaccggttacgcaagcaggttcacaacaaattatctgtataacttcatattgccgacaaagtacgcgttatccctgccggatgtggcgcgagcgccctatccggcatacacagatcgcatcaggttatgtttcgtttgtcatcaacctcaaatcaccaaaataatttattttatttcaataagatagataagtagaactgagaaagccatgctctcgtttcctaagagttgttgcattttgctatatgttacaatataacattacacatcatatacattaactctggaggaaactgttttggcgattcgtctttacaaactggctgttgctttaggtgtctttattgttagcgctcctgcctttagccatggtcatcacagtcacggcaaacccttaacagaggtcgaacaaaaagctgctaatggtgtttttgatgatgccaatgtacaaaaccgaacgctcagtgactgggatggagtctggcaatccgtttatcctttactgcaaagtggcaaacttgaccccgtctttcagaagaaagcggatgcagataaaactaaaacatttgctgaaattaaagattattatcacaaaggttatgcaacagatatcgagatgattggcattgaggacggcattgttgaattccatagaaataatgaaacaacaagctgtaaatatgattacgatggatacaaaatactcacctataaaagtggcaagaaaggcgttcgttacttattcgaatgtaaagatcctgaaagcaaagcccctaaatatatacaatttagcgatcatataattgcaccacgaaaaagttctcattttcacatttttatgggtaatgatagtcagcaatctttattaaatgaaatggaaaactggccaacgtattatccatatcagttgagtagcgaagaagtggtcgaggaaatgatgtctcattgagtattctcatgataacgcctcgatgccgctttagtaagttatcataactgccactggtccatccacaaacgccactgaacgcaagctagctacagacacgctcatcactatgacgtgtctgtatattaataagctaacccgcattgagttaaccaataacggattccatacacaatacggccaacagagaaagatacctgtgctcacgccattgcttatattggctggttacaatatgcactatcaattttttaaataacaaattattaaaaccacatctgtataaggaatttttaaggttcgtgggatagcttgactgtgaaaatcacaggagctacaaaaatgaaccgattcagtaaaactcaaatttatttacattggataacgctgcttttcgttgcaataacctatgccgcgatggaactccgtggctggtttcctaaaggtagtagtacttatctgctgatgcgagaaacacattacaatgcgggtatattcgtttgggtgttaatgtttagtcgcctgattataaaacaccgttatagtgatccttctattgtgccaccgccacctgcctggcaaatgaaagcggctagcctaatgcacatcatgctttatataaccttccttgcacttcctctgctggggattgctttgatggcttacagtggaaaaagctggagtttccttggtttcaatgtgtctccctttgttaccccaaacagcgaaattaaagcactgataaaaaatattcacgaaacctgggcaaatataggctactttttaatcgcagctcacgctggcgcagcactctttcatcactacattcagaaagataatactctgttacgaatgatgcctcgccgcaaataagtcgatccccttacaaggaaatgtgaaccatggacatcaacgcgtcataaatgtttacgcaagtgcacaatgcaccctttccactatcaacaaggaggagcagaaactgtgtaaatcgtacaatggtaagacttatcaaaaatacaggttaattttggtatttaaaccttttttacttgttagtatgatacaaaggctttcaaaaaagctgcgaaattcaacaactcttggaaattatggactttgtcccgcggctttaatctgacggccgcgttccttttttgactcaattattgaacccttctctacgcaacttcagttcccaccaccaactttgcggcagtttcataggatgaatgtctaaaagaataatggtgagcgataagaaaacgactgaataactgcacattttcgctcgaaagcttcctgtcagatccatagcgaatcaagtgctgaatgtcacagtatcgaacagaaaacagtgacgatctaacccttcaagaatattctacgattgttctgtttaggaaaagcaaggcgggaagtcgggagataagtcattgataaagtggcggagagagggggatttgaacccccggtagagttgcccctactccggttttcgagaccggtccgttcagccgctccggcatctctccgttcagatggttgccatgatgccaggaaatttggcattttaacagtccctgtccgtgcaattttgttcaagtgacgagtttgcgagcaaaacgatgattaagtggccctggaaagtacaagaaagtgcacatcaaactgcccttccctggcaggaagcactaagcatcccccttttaacgtgtctgacggaacaggaacaaagcaaattagtcactcttgccgaacgttttttacagcaaaagcggcttgttcctttacagggctttgaactggatagtttaagaagctgccggatagcacttctattttgcctacccgttctggagttaggactggaatggctggatggttttcatgaagtcttaatttatcctgcgccatttgtggtcgatgatgaatgggaagacgatatcggtctggtgcataaccaacgtattgttcagagtggtcagagctggcagcaagggcctatcgttttgaactggttggatatacaagattcttttgatgcttctggttttaacctgattattcatgaagtcgctcataagctggacacccgtaacggcgatcgcgccagcggagttccctttattccgttgcgtgaggttgctggctgggaacacgatcttcatgctgcaatgaacaacattcaggaagaaatcgaattggttggcgagaatgcggcgagcattgatgcttatgcagccagcgatcctgctgaatgttttgccgtactttctgaatatttctttagcgccccagaactttttgctcctcgtttccctagtttgtggcaacgtttctgccaattttatcaacaagatcctttgcagagactgcatcacgctaatgatacagacagctttagcgcgacgaatgttcattaattaacaactttgcagattaattaaccaattgaaatgacttatgaaatttagtgttgacagacaaggtaccgctaagtaatattcgccccgttcacacgattcctctgtagttcagtcggtagaacggcggactgttaatccgtatgtcactggttcgagtccagtcagaggagccaaattctaaaaattcgcttttttagcgcaatgtcactgaccttagttgaacattgttttttaacggatagcgggtttttaacatcttaagcgccctcgacctttatggttgagggcgttttgctatgaacgccatcaccattttcccctcgattataaaacttgagttattcagtagtctcccctcttgcaactcacacccaaaactgcctaacgaaaagttattaattttcaatcatattgctatcagtatttacattttttcgctgtgctagaaagggcgcatttatgttagctcgtagtgggaaggtaagcatggctacgaagaagagaagtggagaagaaataaatgaccgacaaatattatgcgggatgggaattaaactacgccgcttaactgcgggtatctgtctgataactcaacttgcgttccctatggctgcggcagcacaaggtgtggtaaacgccgcaacccaacaaccagttcctgcacaaattgccattgcaaatgccaatacggtgccctacacccttggagcgttggaaagcgcccaaagcgttgccgaacgtttcggtattagcgtggctgagttacgcaaactcaaccagtttcgtacgtttgctcgaggttttgataatgtccgccagggtgatgaactggatgtcccggcacaagttagtgaaaaaaaattaaccccgccgccgggtaatagcagtgacaacctcgagcaacagatagccagtactagtcagcaaatcgggtctctgctcgccgaagatatgaacagcgagcaagcggcaaatatggcgcgtggatgggcctcttctcaggctagtggcgcaatgacagactggttaagccgcttcggtaccgcaagaatcacgctgggcgtggatgaagattttagcctgaagaactcccagttcgattttctccatccgtggtatgaaacgcctgataatctctttttcagtcagcatactctccatcgtactgacgagcgtacgcagattaacaacggcttaggttggcgtcatttcactcccacatggatgagcggcatcaacttctttttcgaccacgatcttagccgttaccactcccgcgccggcattggcgcggagtactggcgcgactatctaaaattaagcagtaacggctatttgcgactgaccaactggcgcagcgcacctgaactggacaacgattatgaagcacgcccggccaatggctgggatgtacgcgcagaaagctggctacccgcctggccgcaccttggcggtaaactggtctatgaacagtattatggcgatgaagtggccctgttcgataaagacgatcggcaaagtaatcctcatgccataaccgctggacttaactatacccccttcccgctgatgaccttcagcgcggagcaacgccagggtaaacagggcgaaaatgacacccgttttgccgtcgattttacctggcaacctggcagcgcaatgcagaaacagcttgacccgaatgaagtcgctgcacggcgtagccttgcaggcagccgttatgatctggtggatcgcaacaacaatatcgttctggaatatcgcaaaaaagaactggttcgcctgaccctgacagaccccgtgacagggaagagtggagaagtgaaaagtctggttagcagcctacaaaccaaatatgccctgaaaggctataacgtcgaagccaccgcactggaagctgccggtggcaaagtggtcacaacgggtaaagatattctggttaccctgccggcttaccggttcaccagtacgccagaaaccgataacacctggccgattgaagtcaccgccgaagatgtcaaaggcaatttgagcaatcgtgaacagagcatggtggtcgttcaggcacctacgctaagccagaaagattccagcgtaagcttaagtacccaaacattgaacgcggattcccatagtaccgccacactgacttttattgcgcatgatgcagcaggtaatcctgttgtcgggctggtgctcagcacgcgtcacgaaggtgttcaggacatcaccctttctgactggaaagataatggtgacggaagctatacccagatcctgaccacaggagcgatgtctggcacgctgacgctgatgccacagctgaatggtgtggatgcggctaaagcccccgccgtggtgaatatcatttctgttagcagttcccgaactcacagcagtattaagattgataaggaccgttatctctccggcaatcctatcgaggtgacggtagaactgagagatgaaaatgacaaacctgttaaggaacaaaaacagcaactgaataacgcagtcagcatcgacaacgtgaaaccaggagtcactacagactggaaagaaaccgcagatggcgtctataaggcgacctataccgcctataccaaaggcagtggacttactgcgaagctattaatgcaaaactggaatgaagatttgcataccgctggatttatcatcgacgccaacccgcagagtgcgaaaattgcgacattatctgccagcaataatggtgtgctcgccaatgagaatgcagcaaacaccgtcagcgtcaatgtcgctgatgaaggaagcaacccaatcaatgatcataccgtcacgtttgcggtattaagcggaagcgcaacttccttcaacaatcaaaacaccgcaaaaacggatgttaatggtctggcgacttttgatctgaaaagtagtaagcaggaagacaacacggttgaagtcacccttgaaaatggcgtgaaacaaacgttaatcgtcagttttgtcggcgacagcagtactgcgcaggttgatctgcagaagagcaaaaatgaagtggttgctgacggcaatgacagcgtcacaatgaccgcgaccgtccgggatgcaaaaggcaacctgctcaatgacgtcatggtcactttcaatgttaatagtgcagaggcgaaactgagccaaaccgaagtgaatagccacgacgggatcgccacagctacgctgaccagtttgaaaaatggtgattatagggttacggcctctgtgagctctggttcccaggctaatcaacaggtgaattttatcggtgatcaaagtactgctgccctgaccctcagtgtgcctagtggtgatatcaccgtcaccaacacagctccgcaatatatgactgcaaccttgcaggataaaaatggcaacccactaaaagataaagaaatcaccttctctgtgccaaacgacgtcgcaagtaagttcagcattagcaacggaggaaaaggcatgacggatagtaacggggttgcaatcgcctccctgaccggcacgttagcgggcacgcatatgatcatggctcgtctggctaacagcaatgtcagcgatgcacagccaatgacgtttgtggcggataaagacagagcggttgtcgttttgcaaacaagcaaagcggaaatcattgggaatggcgtggatgagacaactctgacagcaacagtgaaagatccgagcaatcatccggtggcggggataacggtaaacttcaccatgccacaggacgttgcggcaaactttacccttgaaaataacggtattgccatcactcaggccaatggggaagcgcatgtcacgctgaaaggtaaaaaagcgggcacgcatacggttaccgcaacgctgggtaataacaataccagtgatagccagccggtaacatttgtggcggacaaagccagcgctcaggttgtcctgcagataagtaaagatgagatcacaggtaatggcgtcgatagcgcaacgctaactgcaacggttaaagatcagttcgacaatgaggtgaataatcttccggtaacattcagcagtgcctctagtggactcaccctgaccccgggagtaagtaataccaacgagtctggcatcgcgcaggccactctcgcaggcgttgcctttggtgagaagacggttactgcaagtctggctaataatggtgccagcgacaacaaaactgtgcattttattggcgacacagcggcggcaaaaattatcgagttggcgcctgtcccagacagcataatcgccggtaccccgcagaacagctccggcagcgtcatcaccgccacagtcgttgataataatggctttccggtgaaaggtgtgactgtgaacttcaccagcaacgcagcgacagccgaaatgacgaacggcggtcaagccgtgacgaacgaacagggtaaggctaccgtcacttataccaatacccgctccagcatagaaagtggagcgagaccggataccgttgaggccagtctggaaaatggtagctccacgcttagcacaagtattaatgtcaacgctgatgcgtctacggcacatctcaccttgctacaggcactttttgatacagtctccgcaggcgagacaaccagtctgtatattgaggtgaaggataattacggcaacggtgtcccccagcaggaggtaaccctcagcgttagtccaagtgaaggcgtgacccccagtaataacgctatatatactaccaaccacgacggcaatttttacgcaagctttaccgctacaaaagccggggtttatcaattgacggcaaccctcgaaaatggcgatagcatgcaacaaacagtgacctatgtgccgaacgtcgcgaatgctgaaatcacgctggcagccagcaaggatccggtgattgccgacaataacgatctcacgacactaacagcaacagtcgctgatacagagggcaatgcgatagccaacactgaggtaacatttactctgccggaagatgtgaaggcgaacttcacgctgagcgatggcggtaaagtgattactgatgctgaaggcaaagcgaaagtcacgctgaaaggtacaaaagcaggcgctcatactgttacagcaagcatgactggcggtaagagtgagcagttggtggtgaactttattgcggatacgctcactgcgcaggttaatcttaacgttaccgaggacaattttatcgctaataacgtcgggatgaccaggctgcaggcaacagtgactgatggaaacggcaacccgttagccaatgaggcggtgacattcacgctaccggcagatgtgagcgcaagctttactctcggacaaggcggttccgccattactgatatcaacggcaaggctgaagttacactgagcggtacaaaatccggcacctaccccgtgacagttagcgtgaacaattatggtgtcagtgatacgaaacaggtgactttgattgccgatgctggtaccgcaaaactagcctccttaacctctgtatacagtttcgtcgtcagcacgaccgagggcgcaaccatgacggcaagcgtcactgacgctaacggcaacccggtagaaggcataaaagttaatttccgcggaacctccgtcacgctaagcagcaccagcgttgaaacggatgatcggggtttcgctgaaattcttgtgacaagcaccgaggtcggactgaaaacagttagtgcctctctggcagataaacctactgaagtcatcagccgattactgaatgccagtgcagatgttaattctgcgacgattaccagtctggagataccggaaggtcaggtaatggtcgcacaagacgtagcagttaaagctcacgttaacgaccagtttggcaacccggttgcgcatcaacccgtgacattcagtgcagagccatccagccaaatgatcatcagccagaatacggtctctactaatacgcagggtgtagccgaggtcaccatgacgcccgaaagaaacggtagctatatggtgaaagcatccctgccgaatggagccagtcttgagaaacaactggaggctattgatgaaaaactgacactcacggcgtccagtccgcttatcggtgtctatgcccctacaggcgctactctgacggcaacgctaacctctgcaaatggcactccagtggagggtcaggtcatcaactttagcgtaacgccagaaggggcgacgttaagtggcggaaaagtgagaactaactctagtggtcaggctccagtcgttttgaccagcaataaagtcggtacatatacggtgactgcatctttccataacggcgtaacaatacagacacagacaaccgtgaaagtcactggcaacagtagcaccgcccatgttgctagctttatcgctgatccaagcactatcgccgccaccaacactgatttaagtaccttaaaggcaacggttgaggatggcagtggtaacctgatcgaaggtctcactgtgtacttcgccttaaaaagcggctctgccacattaacgagtttaacagcggtgaccgatcaaaacggaatcgcgacaacaagcgtgaaaggagcgatgacaggtagcgtcacggtaagcgcagtcacgaccgctggtggaatgcaaacagtagatataacgctggtggctggcccggcagacaccagccagtccgtccttaagagcaatcggagtagtctgaaaggggactataccgatagtgctgaattacgtcttgttctgcacgatataagtggcaatccgatcaaagtttctgaagggatggaatttgtgcaaagtggtactaacgtgccctatataaaaattagcgcaattgattacagtctaaatatcaacggtgattacaaagccactgttacaggaggcggagagggtatcgcaacgctgatccctgtattgaatggtgttcatcaagctggtctgagtaccacaatacaattcactcgcgcagaagacaaaataatgagcggtacagtaagtgtcaatggtactgacctaccgacaactacattccctagccaggggttcaccggggcgtattatcagttgaataatgacaactttgccccaggaaaaacggcggctgattatgagtttagtagctctgcctcctgggtcgatgttgatgctaccggtaaagtgacatttaaaaatgtcggcagcaatagcgaaaggattacggcgacgccaaaaagtggaggccctagctatgtatacgaaatccgtgtgaagagttggtgggtgaacgccggcgaggctttcatgatatacagccttgctgaaaatttttgcagcagcaatggctacacgctccccagagcaaactatttaaaccactgtagttcccgaggcatcgggagtctgtacagtgaatggggagatatggggcattacacgactgacgctggttttcaaagtaatatgtattggagttctagtcccgcaaacagtagcgaacaatacgtagtttccctggcaacaggtgatcaaagcgtatttgaaaagcttgggtttgcttatgcgacatgttataaaaacctgtgattttccgttataatttcttaaagagtgttccattcggggcactcttttttacattccctctacagaactagcccttctctcacagaaaatgaataaataaaaatgcggcaccgccagaatcgcgttcgatgtgactatgatcattttcggtgagtactgctttgatctaaaggctggttttctgtgatgattgaccagcctcagagtattgatgacaccaccgttcataacagatcggcattactatgcataagtactgtctcatattctcgccaaaacactttttaatgcctttgcgaattcatccagacttatattgtcaattttttgcccaacgacgactgactccgagacatcggccattgcgggccatcgcgttttgtaatcagcataaattgcaacaacaggggtattataggcacttgccatatgtaatattgaggtgtcaggagttattgcgatataagcatcttttatgattgctgctgaacgtttaatcgagggtggtaaggataaacggtagacattattataacaatccactaatgccctggctttatcttcacctttgggtccatgaacgatcactattggtatatctgtttcactttaaatttttgctattagattttctgcaatcgataatgaaaatgtacgttcctgcgagctaccttctaaattgaacgcaatgtaagatcctaacgatcgcatttcctcgcgcacctcatcgagtacatcctcacttagtggcaattcatatattggcctgactgctggaaaacccgcctcacgcatcataaatgcccatgtcataggtacgggagcccggagtttctgatccatactggacgcgttcttgcacaaaggggagaagcaattcatggttataccaacaacctgaaaattcgtttttgctttcaactgactgataaataacatcgttttcaggttctttttacgcatcccctcaatgcaaagatccggcgtaccgtattgctgtgttatgttctttgctaaatcttttatttcttttaatgttgcgtgatcctgcatagtcattgtgactaatgttaatttagtctgttcaagtttaagcgcattaaagacttctaaattaattgtcgacgttacaattaaaagatgcttaattttatgcaattcaagcgcccgaataacaggaaagatggccatagcatcgccaatctgatcgggaatatggatgacaacaaagtctgttttttcaatattgaaattataagctttataatcgtagtaactaaatgcaatacgtctcaacaatgatgctaaaaacatacctaacctcgcctccctactggttataatgcaatgcagtctatcagactcatcagggtgccattttgtgcatatgcggacttttatgtttcatatctctaacctgtgggtcctctgcttaatccttaaacaacaccagcaactcctgcgctttcatcttccatcgaatttttcatgttgccgctaatcagccataaaatcatttgcagatgcgctctgtcgaggtagtctcataaggttcgtttatagatcgacggcaatgtgagttaccttttccatactaattataaaaagacagtacaaacaggatcattatggactccacgctcatctccactcgtcccgatgaagggacgcttagcttaagtcgcgcccgacgagctgcgttaggcagcttcgctggtgccgtcgtcgactggtatgattttttactctatggcatcaccgccgcactggtgtttaatcgcgagtttttcccgcaagtaagcccggcgatgggaacgctcgccgcatttgctacctttggcgtcggatttcttttccgtccgctcggcggtgtcattttcggtcactttggcgaccgactgggacgtaagcgcatgttaatgctgaccgtctggatgatgggcatcgcgacagccttgattggtattcttcctagtttcagcaccattgggtggtgggcacctattttgctggtgacactgcgtgccattcagggatttgcagtcggcggcgaatggggaggcgcggcgttgctttccgttgaaagtgcaccgaaaaataaaaaagccttttacagtagcggtgtacaagttggctacggtgtaggtttactgcttagtaccggactggttagtttgatcagtatgatgacgactgacgaacagtttttaagctggggctggcgcattcctttcctgtttagcatcgtactggtactgggagcattgtgggtgcgcaatggcatggaggagtccgcggaatttgaacaacagcaacattatcaagctgccgcgaaaaaacgcatcccggttatcgaagcgctgttacgacatcccggtgctttcctgaagattattgcgctacgactgtgcgaattgctgacgatgtacatcgttactgcctttgcacttaattatagtacccagaatatggggctaccgcgcgaacttttccttaatattggtttgctggtaggtggattaagctgcctgacaattccctgttttgcctggcttgccgatcgttttggtcgccgtagggtttatatcacaggtacgttaatcggaacgttgagcgcatttcctttctttatggcgcttgaagcacaatctattttctggatagttttcttctccataatgctggcaaacattgcgcatgacatggtggtgtgtgtgcaacaaccgatgtttaccgaaatgtttggtgccagttatcgctatagtggcgctggagtcggttatcaggttgccagtgtggttggcggtggatttacaccttttattgccgctgcactcatcacttactttgccgggaactggcatagcgtcgccatttatttgctggctggatgcctgatttccgcaatgaccgctttgttgatgaaagacagtcaacgcgcttgatagcctggcgaagatcatccgatcttcgccttacacttttgtttcacatttctgtgacatactatcggatgtgcggtaattgtatggaacaggagacacacatgaataataagggctccggtctgaccccagctcaggcactggataaactcgacgcgctgtatgagcaatctgtagtcgcattacgcaacgccattggcaactatattacaagtggcgaattacctgatgaaaacgcccgcaaacaaggtctttttgtctatccaagtctgaccgtaacctgggacggtagcacaaccaatccccccaaaacgcgcgcatttggtcgctttacccacgcaggcagctacaccaccacgattactcgccctactctctttcgtagctatcttaatgaacaacttacgttgctgtatcaggattatggtgcgcatatcagtgtgcaacccagccagcatgaaatcccttatccttatgtcatcgatggctctgaattgacacttgatcgcagtatgagcgctgggttaactcgctacttcccgacaacagaactggcgcaaattggcgatgaaactgcagacggcatttatcatccaactgaattctccccgctaagccattttgatgcgcgccgcgtcgatttttccctcgcacggttgcgccattataccggtacgccagttgaacattttcagccgttcgtcttgtttaccaactacacacgttatgtggatgaattcgttcgttggggatgcagccagatcctcgatcctgatagtccctacattgccctttcttgtgctggcgggaactggatcaccgccgaaaccgaagcgccagaagaagccatttccgaccttgcatggaaaaaacatcagatgccagcatggcatttaattaccgccgatggtcagggtattactctggtgaatattggcgtgggaccgagtaatgctaaaaccatctgcgatcatctggcagtgctacgcccggatgtctggttgatgattggtcactgtggcggattacgtgaaagtcaggccattggcgattatgtacttgcacacgcttatttacgcgatgaccacgttcttgatgcggttctgccgcccgatattcctattccgagcattgctgaagtgcaacgtgcgctttatgacgccaccaagctggtgagcggcaggcccggtgaggaagtcaaacagcggctacgtactggtactgtggtaaccacagatgacaggaactgggaattacgttacagtgcttctgcacttcgttttaacttaagccgggccgtagcaattgatatggaaagtgcaaccattgccgcgcaaggatatcgtttccgcgtgccatacgggacactactgtgtgttagtgataaaccgttgcatggcgagattaaacttcccggccaggctaaccgtttttatgaaggcgctatttccgaacatctgcaaattggcattcgggcgatcgatttgctgcgcgcagaaggcgaccgactgcatagccgtaaattacgaacctttaatgagccgccgttccgataataagttctgaaccttcttatcagaaatagatgtgaaggagtaagtaagacacctggcaaatagcctgcaataatcgtgggctgtttgcttccttgggcggatacgagttttattatcgtcttaatgatttccacatattaaaagcaagtatgctttcaaaacacaattataaaaaatcccgccaacaatataagtttttataaaattaaatataagattatggctttagaatatttttatttctaatagacgagatttttcctgttatgatataatatgctgaattaacacatgttaacgatttaccagtaatgtaaataaattttcgaggagatcattccagtgggacgtaaatgggccaatattgttgctaaaaaaacggctaaagacggtgcaacgtctaaaatttatgcaaaattcggtgtagaaatctatgctgctgctaaacaaggtgaacccgatccagaattaaacacatctttaaaattcgttattgaacgtgcaaagcaggcacaagttccaaagcacgttattgataaagcaattgataaagccaaaggcggcggagatgaaacgttcgtgcagggacgttatgaaggctttggtcctaatggcagtatgattatcgccgagacattgactagtaatgttaaccgtacgattgctaacgttcgcacaattttcaataaaaaaggcggcaatatcggagcggcaggttctgtcagctatatgtttgacaatacgggtgtgattgtatttaaagggacagaccctgaccatatttttgaaattttacttgaagctgaagttgatgttcgtgatgtgactgaagaagaaggtaacattgttatttatactgaacctactgaccttcataaaggaatcgcggctctaaaagcagctggaatcactgagttcagtacaacagaattagaaatgattgctcaatctgaagttgagctttccccagaagatttagaaatctttgaagggcttgttgatgcccttgaagatgacgacgatgtacaaaaagtttatcataacgtcgcaaatctctaattatcttttaaagaaatctgtctttacggcagatttctttaatctcatataattcttataaaaaatataatattcaactcgtcatattgattatacccccccgttcccagagaaataatatttattaaaattccagttcttctttttctgattacagaaggcaaagtggcaattacgcatagtttcccgataaagacgcgatagcgacatcccgcataaggcatttttctctttatctttgtacggtacttcatggaacagagtttttgaccttgcgaatcgtgatgtctgttggggagggacaatttgctcactgaagcgtgagactcgattaagcgcacgaaacacagaaatcaaaaaacccggtcacttttttacaaggtaaccgggtaaaaataatttttattttttaactgttttgagactcatagagatgtctcaaaactaaaatttggctcctctgactggactcgaaccagtgacatacggattaacagtccgccgttctaccgactgaactacagaggaatcgtgagaacgaggcgaatattagcgatgcccacccacaatgtcaaagcctgttttttaaatttgaaatcgtttgctgaaataatctgcattttgtcgtttattcgctcacaactggctttttttcacacttttgcggctcgggtcgagggtatttccatagccaacgtccagtaaccattcgccagtaaaacagcacggcccgcacagcccagtcggcaaacattcccatccagacaccaaccacaccccagccaagcatgattcccagcacataaccgactacaacccgacaaccccacatgctcaacatgctaacccacatggcgtaacgggcatcacgagcacctttaaatccagcgggtagcacccaactggcggaccaaataggcataaataaagcatttagccaaatcagaatcacaacgacatgtttaacctgtggatcctgggtgtaaaagcttgccataaccccggcaaagggagccgttagccaggcgatggccgttaatccaagagtggaaagccagaacacatgccgcaactgaatctctgcttgcgctatctgccctacccccaaccttcggcctgtaatgatcgtagaagcagagccgagcgcacttccgggtaagttgataagagccgcaatactaaacgcgataaaatttccggcaataacactggtccccatcccggcaacgaacatttgggttaataaccgaccactggtaaataacacactttcgacactcgcgggaataccaatccccatgacttcccagataatgctaaaattcagcggtttaaaatagctctttaagctaatccttagcgcaggattaaaaccaatcgccagcacccacaaaattgcaactgcgccaatataacgagaaatggttaaacccagccctgccccgacaaatcccagtcccggccaggagaaaaggccgtaaatcaatatgccgctaataataatattaagaatattcaggctaccgttaatcaatagcggtattttcgtattccctgcaccacgaagtgccccgctaccaataagagtgatggcagctgctggataactgagtaccgtcagctccagataagtcaacgccagtgctttaacttctgtcgtggcatcacccgcgacgaaatcaataatttgttcgccaaaatgatgaataagcgttgccaacagtacggcaaacaacgtcatgatcaccaaactctgccgcgtcgccaccctcgctcgtcgtcgatcccgcttaccgagactaaatgccacaacgacagtagtaccaagatcgatagcagcaaaaaaagccataatgaccatattgaagctgtccgccaatcccacgccggccatcgcatcttttcccagccagctgaccagaaaagtgctcagaacccccatcaacaggacacaggcattctccatgaagataggaacagcaagcggggttatctcgcgccagaacaacactttgtagctcttgcgtttagcgtgccagcgagtgccgtgaacaacctggcgtaaagcagaggagatattcaaagcgctccttaattgcagaaagtgaaaccacatttcaaataaactgggagaatcagcaaagctgcaaagattttcgccaacaaattgtctgcaaatgcaacaaactgtacttagaaacggcaaacagttggggaatttaaaaatcgggttactcaaaagatttttcgccgttaagatgtgcctcaacaacgattcctctgtagttcagtcggtagaacggcggactgttaatccgtatgtcactggttcgagtccagtcagaggagccaaattcctgaaaagcccgcttttatagcgggatttttgttatatctgataatcaatttcctcttcactgctttccatcacctgccgcttgatatcctcaacactcagtcctgcattacaaagttccagaaagcgccagacatagttacgctgaagttgtcctcgcttcagtcccaaccagacagtattagcatcaaaaagatgccgcgtatccaggcggattaaattctcttcctcttgttcgccactggattgctcggcaactaatccgatcccaagcccaagagcaacataggttttaatgacatcagaatcctgcgcacttaatacaatatctgccagcaaacctttgcgggcaaatgcgtcatcaatacgactgcgccccgtaatcccctgtcggtaagtgattaacggccacttcgctatactttccagcgtcaatggactaatttgcgtcaagggatgatcgtgtggaacaagcaaactatggtgccaacgaaaccacgggaaggcgacgagctgcgggtcattactcaaacgctcgctggcgataccaatatcagcttcgccattttgcaacaatgtcgcaatttcctgtggcgtcccctggattagctcgagccgaacctccgggaaaagttcgcgaaaagctttaatgacctctggcaagctataacgtgcctgagtatgcgtcgttgcaatagtgagaacgccagacgtatcgttggtaaacaggtctgcaagccgacgaacattactggcttcattcagaatacgttctgcaatgaccagtaatgctttgcccggttcagtcatgcccagcagtcgcttacctcgtcgaacaaatatttcgatgccaagttcatcctccagttcccgaatatgacggctgacgccactctgactggtaaaaagcatattcgcaacctctgtcaggttgtaatcctgacgtgcagcctcgcggattatctttagttgttggaaattcacggtaaactccgggcagttcagatttcccgttattgttaaagtctaatgcccggcataacaaataataaaaacccgcatcttattccatcccgatataacacttagctcaccaattgccactgccttttttccatcactggagaactaatcacactcattaacaactctttcactgcctgtgcctgtgggcttaagttcgctctggcgggtaaatttaaactcaaagagagactcatggaaggagtggtaatgcgactcatccacccatttactgcgccacataagctacgcgcggcgctttcgggtaatactgcaacgcccatgccgctggcaatcgctgcggtaagcgtggcaatagactcaatttcaccaataacttttgccgtgagtcgccgtagggaaaaagcctcatcaacacgaagtctaatagcactgtaatcactggggagaaagaggttcatttgcgcaatagcattcacatcaacgctttgccccgggcaatcttgagttcctaccagaaaaagatcttctttcagcaaagcctgactggatacaccagccacaggggaatgctcataaatcaccgccatatcgagttggtgatttatcaatttttcgttaagcactgcaccactattttcatgaagatagataacgatctccggaaattcagcgcgaaccgcctgtaataagggcatggtgatggaactcgcagcggttcctggtgcaaagccaatgctgacttgcccgcttaatgcctgaccaacgttatgcaccgccagttgggcctgttcacactgacgtaaaatggcccgcgcatgggtatagagaatttttccggcgtctgttggtgtaacgccccgctttgtacggatcaaaagttgttgatttaactcaccttccagtgtggcaacctgctggctgagcgctggttgtgcgatatgcaatacttcagcagcctgggtcaggctaccaatatctacaatttttacgaagtatttcaggcgtctgaagttcatgttgcctccggtttttaagaatcggcccaagtgccgccattacttacaaccagattgcaagatgcttgccagttttattttggtgttgatgtacaagctaaccaactgtcaaataagagattatgatagattcgtcatttgctcctttaatcagctgtcgcgttcccctgccctataaaaggagggtatgcaccacgatggttcattacccaataagattgaaagctcaccactttgttgaaattgacagcaaacaaacaaaaaaatgcatttcaccctttgacatcaccatgcactgccattaatatgcgccccgttcacacgattcctctgtagttcagtcggtagaacggcggactgttaatccgtatgtcactggttcgagtccagtcagaggagccaaattcaaaaaagcctgctttctagcaggctttttgctttctaattaccaacgctcttaaaacatctgtctactaccagaactaatttgcacaggcattccgcttcgacgttgcaacgcagcatttgcgcgatttacatcaacttcttgcccgttgataaacgcccgcaaagatggggttaccggcaatggcacttttcggtcagactcatattctgcacgattgcggctcaatggctcatgaacttccagccagttgctgccatctggttcagtggtgtattttactggctggtcgataatttgcacacgcgtcccaacaggaacattatcaaacagatatttgatatcgtcattgcgcagacgaatacagccctgacttacccggagcccaataccaaaattggcattggtaccatggatggcatacaacctgccaatataaatcgcgtacagccccatgggattatcggggcccgcaggaacaaatgcgggcaaactctcccctcgtttcgcatattcgcgccgagtgttcggcgttggcgtccaggttggagcttcttgtttacgttcaacggtagtcacccagttacgcggggtttctcgcccagcctggccgataccaataggaaagacttccacagtattactgtctggtgggtagtaataaagacgcatctcagcgacgttaacaacaatccctttacgaacagtgtcgggcaaaatcagttgctgcggaatggtgagttggctgccagacttcggcaaaaaaacatcagcgcccgggttcgcttccagcatgttacttaacccttgcccgtattgtgcggcaaaagtctccagcggctgggtattgtgatcaggaacagttacagtaaagctctgccccactaaacggctaccctctggaggtaatggataagttaccgccaggctagtatggctggcaaaaagcagagcaaaactgcaaagaatatttacacgacgcatcatgtccctttcctatgtcgcgaaagctatccgttaagtatagcttttatcagacttttcgtttttaactgttcaaatcagaagtcgtattccccggtagaacaatattactggcagcaagttcgcccatgttgttgtatatcgcacaggcagcttcgatgatgggcatcgccagagctgcgccactcccctcacctaaacgcatctccatattgagataaggctccagccccaaatggctgagcgctatacgcgcgcctttttctgcgctcaggtgagaaggaatgagatacggtttgatcgcaggagacatctggcaggctgcgagcgcagcagcataagaaagaaatccatccagcaacacgggtaaaccgcaggaagcagcacctaacatcactccagctattccgaccaaatcaaatccacccacttttgccaggacatcaacaccatcctgaggatttggttgattcaacgtaatcgcccgacgcacaacatcaattttattagccagtttatctgtcggcaggtttgcgccaatcccaaccacttcttcaggatcccggccagtgattgtgctgactattgctgctgccggtgtcgtgtttgccatccccagttcacctacaccaaacagcgtgacaccgttttttgccagctcctgcgtataacatatgacgtccaaaagcaacttttcagcctgacggcgactcattgccggagcactagcaatattgccgctacctcgtgcgacacgcatgttgataagcccggggataggctcagcagtatcaataccaacatcaattacgtggacgttagcgcccgcttgttctgccagcacacacacgccggttgttccacgggtcatattttcagcctgtatggctgtcacttcttttggagaaatagcgaccccttcctcccagacgccgtgatcggcacacataaccagtaccgcttttttgcccacatgcggtatgccattcaaccccggcattcctgccagttgtatggcaagcacctccagctttcccaggctaccaacaggtttgagtaacccgtcaatatgccgttgtgcacggctcatagcggtagaatcgatggctgggatcgtattcagtaaatcggcaagtatttgcatctcacgtctctttatagcagtgccagcaggaagaccagttcaccaagctctatggctgctcccagcgtatcgcccgtttgcccgcccagcgtacgtttgagaagctgaccgaggatgaaaatcgccaccatcgtcaccaccatagcagccacaccatgcatacccggcaataatacggcagcaaaaatagcggctaagccgagtgtgacgcaggtttgtcgcccatcaattttgccaatgaacacattgccaagcccttcttcccgcgcataacgatgacgatacatcaataatgcggcagtcccgcggctgaccgcacatgctgccgccaggcttgcaaggatgctttcgccacgcagagccaactcgcttaacaccagaatctttgccagtaccacaaaaatcaatgccagaccgccgtgggtgcctaaacggctatcacgcatgatttccaacatgcgatcgcggctacgtgcagaaaatacgccatcacaggtatcagcgaggccgtccagatggaatcccccggtcatcagcaccagcacaagtacgctaaacagtgccgccagtggtgcgccacaccatgcctgcagcaccatgaagaccagcccgctaatcgcgccaagcaataatccaatcaaaggaaaagtaataataccgcgagaataatgctcgaaatccagtccctgggaccagcgacgcggtacaggcagacgcgtaataaaactgagcatcgcccaaaataatttactcatttgatttttactccaataccgctaaccaccagccatacttcatttgccgcagcggccaactgctgatttacccgcccggcaatatcacgaaaatgtcgtgccagacgactctccggcacaatccccattcccacttcgttagtcactaatacaacctttgcggggcaacgttggcaggcagcaatcaagctctgaatctcagcattaatcgcctgttccatcgcctgataatcccattcatcagggtctttatcgccgccataatcaaacaacagattagtcaccattgtggtaacgcattcaagcaacacaacctcattcgggttaatgtctgcatgaattaattcatcaagatgttgccagcgctccactgtgcgccagtgctccgggcggccttgccgatgatgttctatccgtgcagccatctcatcatcaaggatttggctggtagcgatatacagaacctgactagagtccccaataagcgcctctgcgtggcgactcttcccgctccgtgcgccccccgtcaccaaaatcatcataccgactcctgattcaaatgtatgatggtattcattgaacagaacaatggatcccccaccgttgctgaccgcaaaacatttacgcgattaatactgcgcgtaatataattaaaaatccagcattctcaatccattacgaaataagatggcattacggaatagccagactttctcgtgttaacgtccgacaaaatgcgtcattgacagcggtttctgtggattgacacatttcattcagataatgaattaatgctactgccggaacaaccagcaaacgggcattgtgttctgaaatccaggctattgattcaacgtcagcgacagatctgcgctgtaaaagaacttgtaaaacaacgtaatagaattatccggaatggtggcgactatgcactagggaaggtgcgaataagtggggaaattcttctcggctgactcagtcatttcatttcttcatgtttgagccgattttttctcccgtaaatgccttgaatcagcctatttagaccgtttcttcgccatttaaggcgttatccccagtttgcagaaactccgtaatgagattaaaagcgctcataactcatctgtcggccagaaggcgcgcctctgaattatccgacggacaaaccgggaacagtgtaatttcccggcaggagcgaaaaaattgaaaggcgcatcttactcttttcgctttcaaaaaaaagagtggtcatcgcgttaacacaccgccctgagatgaattagtgatgttttggctgcaccgcaacatacatttcgatatcccagtacccatcttccgcgccattgttcaaataaacctcgaagcagggctttggtaacatttcataagcactgtcctgcaagagactattaaagaactgataccagggtttagcaaaatcatcaccgactacacgagctaccgccaccgcatactgaccacctgtaatttctgtcagaatgacgccctcactgttttcgggaagcgtaaagtaacccggcaccgtcacgacggtgtcgcagcgtaatttttcggcgggtgtttcatctggattgtcgtaatagacagcaacccactccttcggcacaatatttttgctatctacccacatcatcaactgctcaaagcctttctttaccgtctgttcccacgggccaacgagatggaaacctgcaacggtacgtttctcttcctgcttaatctcgtagttcatgacgcctccattgatactgtttttatatacagtatagttgcaaaattaaaaccacaaggaatgagtgttgattatgcgagcagactcgcactcctgccagtctgctgcaaaagaaaggtcaggccttatggtggaaataatcactcaggcgagaaaacatgctgccttccccgacagattccagggtaaccagcggccagtgcgccacctgtttatcacggtcgtaaagttcaatttcccctacccgctgatgggcgctaattggcgcggtgagttctttaccatcaagggtatatttggctttgatatgtggaatttcggctttcggtagcaccatccagaactcttgttccgttcccaggtcgatattttctttatcgccataccagatgcgttccgttccgacctttttcccacggtgcaaaatttgcaccgtagtaaagttttgttgcccccaacgcagtaattttcttgcctcttcctcacgaccttttgcactgtcagcccccattaccactgcaatgagacgacgctgcccatctacagcgctagcaatgagattaaacccggcaccagaagtatgacccgttttcaggccgtcaacattcatggttttatcccacaacaacccgttacggttttgctgggtgataccgttccaggtgagacttttctcactgtacatatgataaaactcgggctcgccgtggatgatagcacgagaaagcacagctaaatcataagcgctgctatgctggccaggtgcatccagaccatgcactgtttcaaaatgcgtatccttgagatgcagcttctcggcatagttgttcatcatttcaacaaactgccgttgcccaccggcaatatagtcagccagagcaacacaagcgtcatttccggaatccacaattaaaccacggcttaaatcacgtacgcttacgcgatcgccctctttcaaaaacatcagactagaaccgacaaacaccggattatctttcgcccacgcatcgcgccccacggtgacaatatcgtctggcgtaatgcgatgactatcgatagcgcgatccacgacataacccgtcatcagctttgtcaggctggcgggattgcgctgttgatgctcattacccgcggtgaggatctgaccggtggtgtaatccatcaatacccaggacccggcatgaatctctggaggctgaggactaaaaggaatgttttccgccgcaaaaccagagcttaagttaaaaacgaacaaagaagcagcaataataagacggcgtttcaacagcaaaccctcaggagtttcaaatagctgttctttttacggaaatacttatgaactggctggaataaagtgcaagaaaatgtgactaccctctcatttttatctgacatgatctgttgccactcgctgccaaattgtggcgctaaagctgattagcacggtgatatttgatactctggcagacagcagaaataacggatttaacctaatgatgaatgacggtaagcaacaatctacctttttgtttcacgattacgaaacctttggcacgcaccccgcgttagatcgccctgcacagttcgcagccattcgcaccgatagcgaattcaatgtcatcggcgaacccgaagtcttttactgcaagcccgctgatgactatttaccccagccaggagccgtattaattaccggtattaccccgcaggaagcacgggcgaaaggagaaaacgaagccgcgtttgccgcccgtattcacagcctttttaccgtaccgaagacctgtattctgggctacaacaatgtgcgtttcgacgacgaagtcacacgcaacattttttatcgtaatttctacgatccttacgcctggagctggcagcatgataacagccgctgggatttactggatgttatgcgtgcctgttatgccctgcgcccggaaggaataaactggcctgaaaatgatgacggtctaccgagctttcgccttgagcatttaaccaaagcgaatggtattgaacatagcaacgcccacgatgcgatggctgatgtgtacgccactattgcgatggcaaagctggtaaaaacgcgtcagccacgcctgtttgattatctctttacccatcgtaataaacacaaactgatggcgttgattgatgttccgcagatgaaacccctggtgcacgtttccggaatgtttggagcatggcgcggcaataccagctgggtggcaccgctggcgtggcatcctgaaaatcgcaatgccgtaattatggtggatttggcaggagacattagcccattactggaactggatagcgacacattgcgcgagcgtttatataccgcaaaaaccgatcttggcgataacgccgccgttccggttaagctggtgcatatcaataaatgtccggtgctggcccaggcgaatacgctacgcccggaagatgccgaccgactgggaattaatcgtcagcattgcctcgataacctgaaaattctgcgtgaaaatccgcaagtgcgcgaaaaagtggtggcgatattcgcggaagccgaaccgtttacgcctagtgataacgtggatgcacagctttataacggctttttcagtgacgcagatcgtgcagcaatgaaaattgtgctggaaaccgagccgcgtaatttaccggcactggatatcacttttgttgataaacggattgaaaagctgttgttcaattatcgggcacgcaacttcccggggacgctggattatgccgagcagcaacgctggctggagcaccgtcgccaggtcttcacgccagagtttttgcagggttatgctgatgaattgcagatgctggtacaacaatatgccgatgacaaagagaaagtggcgctgttaaaagcactttggcagtacgcggaagagattgtctaatttgaagcctccgccgctggtacggcggaggacaatgttgagtcaggctttttgaacggtgatgctccacgctgcatcgccaatctgctgataatcggtgatggcatgtccttcttctgccgcccactgtgggattgcttcagttgcctgggtgcaatcaaactcaatcactaactcatcgccgctgaccatttctgccagagctgcttttgcttctatgagtggaaacggacagacctgcgtcaccacatccagctttttaatcaccatctttacaccttacttaatttgccgcagcagttgccagtcgcgccttacgctgcggtcgaacatacacaagccaggacgcagtccagactccgagaatcataaatacaaggccaatccagccctgccaggtcatcattgcagtcataaccagtccattaccgatagagcaaccacctgcaatactggcaccgaagcccatcagtacaccacctaacccgctacgtaatgttgtttgtgcatcagctgcgcgaacgcggaactcacggctcgctttggctgcaataaaactccccacgaagatccctaacaccaggaaaacgccccagttaatgtatttcatgtcacccgcgaccagaaattgcagaatattggccgttggggaagtgattcctaacccaaacatgcgtccggttgcttcactcaggggccaggctaaaagcgcaatcaaaccgatgagtacagctgtgacaaagggatgccagcgtttttcaaacagaatatgagcgatcccggttcggcgcggcggtaaggtcgcgactttgagttttggcttcttcaactctttcatcaccacccagagcgttatcaccagcaaaacggcaaccaacggccacacagacaaattaaaagtctcagcaatagagttatgttcagtactgtagtgctgcaaggtttgatttaaaccactggcatgtggagaacgcatcaccgcactcatcaccatataagtgaaaagcgcgatccaactgccgatcaatccctcacccgcgcgataccaggtcccggtggcacatccacccgccagaacaattcccagcccgaagatatacccacctataacagtaccaagccacgggaacgccccggcttcgtaagtcagtaggcccgcctgaattaacgcaaaaacccccacgctttgtacgctaattgcaatcagcaaggcgtaaaacatgcgattatttttcacgatatacatatcgcgaaaaccacctgtcaggcaaaaacgcccacgctgcatgacaaatcccagcagagcaccacaaattagcccgcttaatatcatactaaacataaattaattaaccagatgaatgttaatgaggaaattattcatgactggtggaatgcagaccaataaccaaattctctaaattagaacaaatggttattaatgaggagttcgatacaaaagaataaaaaaaccggagccaaatgttcattcgactccggtttattattagaaaagatgattatgctacgtcttcgtactgcggaaccggattacggaagctcttggtgacgcaagccaggtaaatcagaccgatagcagcccagatcagacccagaaccatactgctttcttccaggttaacccacagcgcaccaacggtcagcgcaccacacatcggcaggaacagatactggaagtgatctttcagcgtcttgttacgcttctcacggatccagaactggctgatgacgctcaggttaacgaaagtgaacgccaccagcgcaccaaagttaatcagcgccgttgccattaccaggtcgaagttgattgccagcagggcaatcgcgccaaccaggatgatgttcatcgccggagtacgccatttcgggtgtacataaccgaagaagcttttcgggaatacgccgtcacgacccattacgtacatcagacgcgctacgcctgcatgcgccgccataccggacgccagtacggtaatggtggagaagatcagcgcgccaacctggaacgctttacccgcaacgtacagcatgatttcaggctgactcgcatccggatctttaaagcgagagatatccgggaagtacagctgcaggaagtaagttgcaaagatgaagatcatgccgccgatcagcgcggtcaggaaaatcgcacgcgggatcacgcgctctgcatctttggtttcttcgctcaggttgctgatgccgtcaaagccggtaaaggagaagcacaggattgtcgccccggtaatcatcgggataacatgcgcatcgccagaccagaatggacgagtgctcgccagcgtaccagcgccttcaccttcaaatacgccataaacaaccatgcccagaatcaccgcgatcagcactacctgcaacacgacgattacagtgttgaagttcgctacggatttcagactacgcaggttaaaggcggtcataaaggccaccagcgccaccacaaacatccagcttgggatggaaggcaccagagcttcaaaatagattttcgccagtagaatgttgatcatcggcgcgaacagatagtcgagcagagaagaccaacccaccataaagccgacagtcgggctaatggatttctgggcgtaagtgtatgcagagccagcagaaggatagcggcgaaccagcttcccgtagctcagagccgtaaacaggatcgcaatcaatgcgaacgcataggctgtcggcacatgaccatccgtgaggccactaacgataccaaaagtatcaaacagcgtcatcggctgcatataggcaagacccatcattacaaccggaactaacgtaagcgttttacgcaattccacgcgagaggtgtttggagtaacgttatggctcatggtcattctcctttacggtgataaccgtcgcgtaagcaaaaaattgccccatttttttggattcctcagcgacaacaactgtcgatttttagtaaatatctatccggtacgaagcccggcctcttggtatgaatgattggtttgaagcaaaaaataaccgacgctgatgaaacgtcggtttttagtcattttttgacagcggcgcattgtgcctaaatgggggggaaatgacaagagaatgagaggcttgtcagaataatttttctttaaatggcactttttccgtcatcagattttgcataaacaccggcgatcgcactatttgctaaaatttcatcccgccaccagccactggcaagtcctgcggtctgttcgttccagccaatccagacgggttcaaagagagtttgggcgaccactttcttctcgattaacgcgccactatcgagaaaacgttgcgccagataacggggtaaatagccgcagccgaggccgctaatttgcagctccagtttggttttaaaatcgaaaacggtaatggcttcttgttcgtcgagaagttgacttgccgtagaagcgcctgcctgcgcagtatcccccaccacaatcgcccgatatcgcttaataatacgacgatttaacggctcttcttccagggctaacggatgatgaggcgcgaccgcaaagacttgttccagatcgcccaaccgactaaaaccaaactcactggaagatggtggctcatgcatcgcgccaacaataatatccgctcgcccctgagtcagggcatcccaactaccaccgagtacgccattgataaacttcaggcgcgtcacgctatgatgttgataaaaagcttcaatgagtggcgcaagcagagaaaaaggaaacgtgtcgtccacgccaatcaccagctcgttttcccagccttcatgcagtttgatcgcctgcttttccagttcccgcacggtatgcagaacttcccgccctttctctaataacatttttccggtgcgggtgaatttagcgcggtgtccgctacgatcaagcaattgaatattaaggtcgctttccagcttgtgaacggtgtaactcagagcggacggcgtcttgtagagtttggcgctcgccgccgcaaaactgccttctttttctaaggcatcgaggatcatcaacacatccagcagtggtttcatacacgcccccttgcagtgcatgcggcgtcctgctggcgtgatcgtttactccagcggcattaccagcggatcgggatactggtattcaaatcccagttcattacaaatccgactgccatcaataatcttacctttgccgctgtccagactatttctgaactgcggaggttccagccccagtaaacgggccatctgcggatagaaaacattacgcgcagggtgagctggcgcacatatattatagatgtgtccgcctttaggtgcctgtaacaacagagtgatagcgccaataacatcttctaaatggactaaattaacaccatgttcaccatcaggcgcggtttttccggcaaagaagcgtccgggatgacgtcccggtccgaccaggcccgcaagacgcagaatatcgacgctagtaccgggtaaattgtgcagccagtcttcgagttcttctaatactcgtccactgttggttactggattacgcggggtggtttctttcaccgtgccttgcgcgtcgccatagacagatgtactgctggtaaaaataatgcggggaatacgatgggccagcgcgctatccactaactcttgtaccgcttgtaaatagaactcatcgccggggccgctacgacgtgccggaagcgtaatgaccagcgcatcggcatccatcagggcatccagatcgtcagaatcgcaaactagctcaggctccatgcgaagcagatagctatcaatgccactcattcgggccgcttcgacaccatcttgtgtggttttactcccggtgacttgccagcctcgcgcactaagactcatcgccagcggcatgcctaaccaccctaacccgacaattgcgacctttttcatccgttatctcctgatacaccttagatctataaggctacgctagcgtatcaaaactgacaattcattctatgaatgaatctgttcaataatgataacgacatgctgcaatgagcagactatcgtcggtaaccgcgtataccagacggtgctcctctgtaatgcgtcgggaccagaaaccactcaaattatgtttcaggggttctggcttccccttaccttcaaatggcgttctgcgggtatctttgataagttcattgatctttttaacaattcgcttatctgtttcctgccagtacagataatcgtcccaactttcctcagaccagattagtttcactcaatgatgtccttttccgttcctttgccacttttcaggctatcgatactgtccatcaatctccgggcgttagcgggggagcgcagtagataagccgtctcttccaggctgttgtattcttcgagactcatcagaacacaagcctctccattctgacgagtaataaggatcggggcatgatcttcaacggctttcatcattgttgcgctcaaattctgacgcgcttcgctgtagctaattgtacgcatgtcaatctcctcttttgtacagttcattgtacaatgatgagcgttaattaactatttattaattagtttgtagatcaaggtattgtcagtgagacgaaaatccaggcttcgctatttttggtgccatcagctaagaggacagtcctcttagccccctcctttccccgctcattcattaaacaaatccattgccataaaatatataaaaaagcccttgctttctaacgtgaaagtggtttaggttaaaagacatcagttgaataaacattcacagagacttttatgacacgcgttcaatttaaacaccaccatcatcaccatcatcctgactaatctttcaggcgatgtgtgctggaagacattcagatcttccagtggtgcatgaacgcatgagaaagcccccggaagatcaccttccgggggcttttttattgcgcggttgataacggttcagacaggtttaaagaggaataacaaaatgacagacaacactcgtttacgcatagctatgcagaaatccggccgtttaagtgatgacagtcgcgaattgctggcgcgctgtggcattaaaattaatcttcacacccagcgcctgatcgcgatggcagaaaacatgccgattgatattctgcgcgtgcgtgacgacgacattcccggtctggtaatggatggcgtggtagaccttgggattatcggcgaaaacgtgctggaagaagagctgcttaaccgccgcgcccagggtgaagatccacgctactttaccctgcgtcgtctggatttcggcggctgtcgtcttagcctggcaacgccggttgatgaagcctgggacggtccgctctccttaaacggtaaacgtatcgccacctcttatcctcacctgctcaagcgttatctcgaccagaaaggcatctcttttaaatcctgcttactgaacggttctgttgaagtcgccccgcgtgccggactggcggatgcgatttgcgatctggtttccaccggtgccacgctggaagctaacggcctgcgcgaagtcgaagttatctatcgcagcaaagcctgcctgattcaacgcgatggcgaaatggaagaatccaaacagcaactgatcgacaaactgctgacccgtattcagggtgtgatccaggcgcgcgaaagtaaatacatcatgatgcacgcaccgaccgaacgtctggatgaagtcatcgccctgctgccaggtgccgaacgcccaactattctgccgctggcgggtgaccaacagcgcgtagcgatgcacatggtcagcagcgaaaccctgttctgggaaaccatggaaaaactgaaagcgctgggtgccagtagtattctggtcctgccgattgagaagatgatggagtgatcgccatgagctttaacacaatcattgactggaatagctgtactgcggagcaacaacgccagctgttaatgcgcccggcgatttccgcctctgaaagcattacccgcactgttaacgatattctcgataacgtgaaagcacgcggcgatgaggccctgcgggaatacagcgcgaagtttgataaaaccacggttaccgcgctgaaggtgtctgcagaggagatcgccgccgccagcgaacgcctgagcgacgagctaaaacaggcgatggcggtggcagtaaagaatattgaaaccttccacactgcgcaaaaactgccgccggtagatgtagaaacgcagccaggcgtgcgttgccagcaggtcacgcgtccggtagctagtgttgggttgtatattcctggcggctccgccccgctcttcagtacggtattaatgctggcgactccggcgagtattgcgggctgtaaaaaagtggtgctgtgcagtccgccgccgattgccgatgagatcctttatgcggcgcagctgtgcggtgtgcaggacgtgtttaacgtcggcggcgcacaggccattgccgcactggcgtttggtacggaatctgtgccaaaagtggacaaaatcttcgggccgggtaacgcctttgtcaccgaagcgaaacgtcaggtgagccagcgtctggacggtgcggcgatcgatatgcccgcaggcccgagcgaagtgctggtgattgctgacagcggcgctacgccggatttcgtggcttctgatttgctctctcaggctgaacacggcccggacagtcaggtgattttactgacgcccgctgctgatatggcgcgtcgcgttgccgaggccgtcgaacgccaactggcagaactgccgcgtgccgaaaccgcccgccaggcactgaacgccagccgcctgatcgtgactaaagatttagcgcagtgcgtggagatctccaaccagtacggcccggagcacctgatcattcagacccgcaacgcccgtgaactggtcgatagcatcaccagcgccggtagcgtatttcttggtgactggagtccggaaagcgcaggtgattacgcctccggcaccaaccacgttctaccgacttacggttacaccgccacctgttccagcctcgggctggcagatttccagaagcgcatgaccgtacaggaactgagcaaagaggggttctccgcgctggctagtaccatagaaacactggccgccgccgagcgcctgaccgcccacaaaaatgccgttactttgcgtgttaacgcccttaaggagcaagcatgagcaccgtgactattaccgatttagcgcgtgaaaacgtccgcaacctgacgccgtatcagagcgcgcgtcgtctgggcggtaacggcgatgtctggctgaacgccaacgaataccccactgccgtggagtttcagcttactcagcaaacgctcaaccgctacccggaatgccagccgaaagcggtgattgaaaattacgcgcaatatgcaggcgtaaaaccggagcaggtgctggtcagccgtggcgcggacgaaggtattgaactgctgattcgcgctttttgcgaaccgggtaaagacgccatcctctactgcccgccaacgtacggcatgtacagcgtcagcgccgaaacgattggcgtcgagtgccgcacagtgccgacgctggacaactggcaactggacttacagggcatttccgacaagctggacggcgtaaaagtggtttatgtttgcagccccaataacccgaccgggcaactgatcaatccgcaggattttcgcaccctgctggagttaacccgcggtaaggcgattgtggttgccgatgaagcctatatcgagttttgcccgcaggcaagcctggctggctggctggcggaatatccgcacctggctattttacgcacactgagcaaagcttttgctctggcggggcttcgttgcggatttacgctggcaaacgaagaagtcatcaacctgctgatgaaagtgatcgccccctacccgctcagcacgccggttgccgacattgcggcccaggcgttaagcccacagggaatcgtcgccatgcgcgaacgggtagcgcaaattattgcagaacgcgaatacctgattgccgcactgaaagagatcccctgcgtagagcaggttttcgactctgaaaccaactacattctggcgcgctttaaagcctccagtgcggtgtttaaatctttgtgggatcagggcattatcttacgtgatcagaataaacaaccctctttaagcggctgcctgcgaattaccgtcggaacccgtgaagaaagccagcgcgtcattgacgccttacgtgcggagcaagtttgatgagtcagaagtatctttttatcgatcgcgatggaaccctgattagcgaaccgccgagtgattttcaggtggaccgttttgataaactcgcctttgaaccgggcgtgatcccggaactgctgaagctgcaaaaagcgggctacaagctggtgatgatcactaatcaggatggtcttggaacacaaagtttcccacaggcggatttcgatggcccgcacaacctgatgatgcagatcttcaccagccaaggcgtacagtttgatgaagtgctgatttgtccgcacctgcccgccgatgagtgcgactgccgtaagccgaaagtaaaactggtggaacgttatctggctgagcaagcgatggatcgcgctaacagttatgtgattggcgatcgcgcgaccgacattcaactggcggaaaacatgggcattactggtttacgctacgaccgcgaaaccctgaactggccaatgattggcgagcaactcaccagacgtgaccgttacgctcacgtagtgcgtaataccaaagagacgcagattgacgttcaggtgtggctggatcgtgaaggtggcagcaagattaacaccggcgttggcttctttgatcatatgctggatcagatcgctacccacggcggtttccgcatggaaatcaacgtcaaaggcgacctctatatcgacgatcaccacaccgtcgaagataccggcctggcgctgggcgaagcgctaaaaatcgccctcggagacaaacgcggtatttgccgctttggttttgtgctaccgatggacgaatgccttgcccgctgcgcgctggatatctctggtcgcccgcacctggaatataaagccgagtttacctaccagcgcgtgggcgatctcagcaccgaaatgatcgagcacttcttccgtagcctcagttacaccatgggcgtgacgctacacctgaaaaccaaaggtaaaaacgatcatcaccgtgtagagagtctgttcaaagcctttggtcgcaccctgcgccaggccatccgcgtggaaggcgataccctgcccagcagcaaaggagtgctgtaatgaacgtggtgatccttgataccggctgcgccaacctgaacagcgtgaagtctgccattgcgcgtcacggttatgaacccaaagtcagccgtgacccggacgtcgtgttgctggccgataaactgtttttacccggcgttggcactgcgcaagcggcgatggatcaggtacgtgagcgcgagctgtttgatctcatcaaagcctgtacccaaccggtgctgggcatctgcttagggatgcaactgctggggcggcgcagcgaagagagcaacggcgtcgacttgctgggcatcatcgacgaagacgtgccgaaaatgaccgactttggtctgccactgccacatatgggctggaaccgcgtttacccgcaggcaggcaaccgcctgtttcaggggattgaagacggcgcgtacttttactttgttcacagctacgcaatgccggtcaatccgtggaccatcgcccagtgtaattacggcgaaccgttcaccgcggcggtacaaaaagataacttctacggcgtgcagttccacccggagcgttctggtgccgctggtgctaagttgctgaaaaacttcctggagatgtgatgattattccggcattagatttaatcgacggcactgtggtgcgtctccatcagggcgattacggcaaacagcgcgattacggtaacgacccgctgccgcgattgcaggattacgccgcgcagggtgccgaagtgctgcacctggtggatctgaccggggcaaaagatccggctaaacgtcaaatcccgctgattaaaaccctggtcgcgggcgttaacgttccggtgcaggttggcggcggcgtgcgtagcgaagaagatgtggcggcgttactggaagcgggcgttgcgcgcgtagtggtcggctccaccgcggtgaaaagtcaagatatggtgaaaggctggtttgaacgcttcggtgccgatgccttagtgctggcgctggatgtccgtattgacgagcaaggcaacaagcaggtggcagtcagcggctggcaagagaacagcggcgttagtctggaacaactggtggaaacctatctgcccgtcggcctgaaacatgtgctgtgtaccgatatcagccgcgacggcacgctggcaggctctaacgtctctttatatgaagaagtgtgcgccagatatccgcaggtggcatttcagtcctccggcggtattggcgacattgatgatgtggcggccctgcgtggcactggtgtgcgcggcgtaatagttggtcgggcattactggaaggtaaattcaccgtgaaggaggccatcgcatgctggcaaaacgcataatcccatgtctcgacgttcgtgatggtcaggtggtgaaaggcgtacagtttcgcaaccatgaaatcattggcgatatcgtgccgctggcaaaacgctacgctgaagaaggcgctgacgaactggtgttctacgatatcaccgcttccagcgatggccgtgtggtagataaaagctgggtatctcgcgtggcggaagtgatcgacattccgttttgtgtggcgggtgggattaagtctctggaagatgccgcgaaaattctttcctttggcgcggataaaatttccatcaactctcctgcgctggcagacccaacattaattactcgcctggccgatcgctttggcgtgcagtgtattgtggtcggtattgatacctggtacgacgccgaaaccggtaaatatcatgtgaatcaatataccggcgatgaaagccgcacccgcgtcactcaatgggaaacgctcgactgggtacaggaagtgcaaaaacgcggtgccggagaaatcgtcctcaatatgatgaatcaggacggcgtgcgtaacggttacgacctcgaacaactgaaaaaagtgcgtgaagtttgccacgtcccgctgattgcctccggtggcgcgggcaccatggaacacttcctcgaagccttccgcgatgccgacgttgacggcgcgctggcagcttccgtattccacaaacaaataatcaatattggtgaattaaaagcgtacctggcaacacagggcgtggagatcaggatatgttaacagaacaacaacgtcgcgaactggactgggaaaaaaccgacggacttatgccggtgattgtgcaacacgcggtatccggcgaagtgctaatgctgggctatatgaacccggaagccttagacaaaaccctcgaaagcggcaaagtcaccttcttcagccgcactaaacagcgactgtggaccaaaggcgaaacgagcggcaatttcctcaacgtagtgagtattgccccggactgcgacaacgacacgttactggtgctggcgaatcccatcggcccgacctgccacaaaggcaccagcagttgcttcggcgacaccgctcaccagtggctgttcctgtatcaactggaacaactgctcgccgagcgcaaatctgccgatccggaaacctcctacaccgccaaactgtatgccagcggcaccaaacgcattgcgcagaaagtgggtgaagaaggcgtggaaaccgcgctggcagcaacggtacatgaccgctttgagctgaccaacgaggcgtctgatttgatgtatcacctgctggtgttgttgcaggatcaggggctggatttaacgacggtaattgagaacctgcgtaaacggcatcagtgagttgcggggtaagcggatgcgatattgttgccgcatccggcaaaaaaacgggcaaggtgtcaccaccctgccctttttctttaaaaccgaaaagattacttcgcgttgtaattgcgtagagcattacgccccagcacaatccccgcgccaaccatgccacccagcagcaccgccagaatcaaggtaattgcctttttcgggctatcacgacgaataggtaacatcggtttcatcacataacggtaagcatgaatatcaagatcatcaacttttaagctttcgatatccagcaggttttgacgagtctgatagtagtttgggctgaacaccaacggacgggtcgcctcatgcttaatcatgctctccagcgcttcgctccccaaaaggaacaacgtatcttgtgtgatatcttcgccagtctgttgaatctgcggttttgtcacctgcgcctgattcgcatactgcaacgcttcctgaatctgacggatacgcagatctttctgctcctgcgcgactacttcctgcgttcttaaagagtcctgcaagtttttccgtcccagagcaatgttgtctttgagatccttttctagctcttgattcactttatcgtcaacttgctgaatgtattgggccaacttcatttgtgcgccctctgcagtttgcccaacataagaaacagtcaatggtaattgctggttcttaacagaaggttcgatggtaagtttttctcgttcttcctgattatccagcgtttctgctaatgcagagaaggcagaactgaagcgaccaattaacgtctcctgcaaatcgcttactttcggtgcagcctgaccatagataacattcatggcattgttatagccagcaatttgccccacgtcgggctgagtgataattgctgtactcgtccatttctccttcgctactgccaaatatccaatagccagggcaatagccacaatgacggaaatgatgattgtcatcttgccacgccacaactgcactagtaaatcaatcaaatcaatctgttccgggtcatggttttgcccagaaacattattattttctactctcatcattaccctaactgacggaaatttccaagtccgcatagtttagcgataatcctcgtgaatgctataggataagtgataaaaataatgaattgttgtgtaagtaacaaaagacaatcagggcgtaaatagccctgataacaagatgttagtcgctgccaaagagatcgcgggtgtataccttatctgccacatccttaagctcttctgccattcggttagagataatgacgtcggcttgttgtttgaaggtggcgagatcacgttccaggcgagagttgaagaaactgtcttctttcatcactggctcgtagatgatcacttcaacacctttcgccttgatacgtttcataatcccctgaatagaagacgcacggaagttatcactaccgctcttcataatcagacgataaatacccaccacttgcggcttgcgactcaaaatggcatcggcaataaaatctttacgcgtgcggttagcatcgacaattgcgctgatcaggttattcggcacagactggtagttcgccagtaactgcttggtatctttcggcagacaataaccaccataaccaaagctcggattgttgtaatggttgccaatacgtgggtcgagacaaacgccttcgattatttgacgggaattcagacctaaactttctgcatagctatccagttcgttaaagtacgccacgcgcatcgccaggtaggtgtttgcaaaaagtttaatcgcttctgcttcagtggagtcggtaaacagcatcgggatattttgcttaatcgcgccttcctgtaacagagcagcgaaacgttctgcgcgttcactacgctcaccgatgacaatacgactaggatggagattatcgtaaagggctttaccctcacggagaaattccggggagaatataatattttcagtgcgatatttcttatgcatcgctgcggtaaaaccaacgggaaccgtacttttgatgaccataaccgcataaggatttatctcaactacgtctttaattacactttctacactggatgtattgaaataattagttttaggatcatagtcggttggagtggcgatgatgacataatcagcatcccggtaggcttcatttttatctaatgtggcattaaagtgtattttatcactttgcaaaaactgctgaatttccttatcaacaataggagatatccgatcattcagcatagcaacgcgactcggtaaaatatctaatgccacaacctcatgattttgtgcgattagaagcccgttactcaagcctacatagccagtaccggaaatggtgattttcatttcatgctctcagaattaacttaactgtgaatcatgatgtttttagcatcctgataagagctaaaagttttaacgctacgttgttcgatggtcaacgcaacgaaaaacaattcagattttctttataagaatagctgatatttattaagttaatattaagcagtgaaatttagtctataagatatttggcaaaaaaaagcccggtgcaatatacgccgggcctcaattttattgttggttaaatcagattaatccagccattcggtatggaacacaccttctttatcaatacgcttataagtatgcgcaccaaaatagtcacgctgtgcctggatcaggttcgcaggcagaacagcagcacggtagctgtcgtaataggcaaccgctgcggagaaggtcggaaccggaataccgttctgtactgcataagcaacgacatcacgcagcgcctgctggtagtcatcggcaatttgcttgaagtacggagccagcaacaggttagcgatctgtggattttcggcataagcatcggtgattttctgcaggaactgcgcacggatgatgcagccagcacggaaaatcttcgcgatttcgccgtagttcagatcccagttgtactcttcagacgcagcacgcagctgagagaagccctgggcgtaagaaacgattttgcccagatacagcgcacgacgaactttttcgatgaactcagccttgtcgcctgctggctgtgcttgcggaccagagagaactttagatgcggcaacacgctgatctttcagagaagagatataacgtgcaaacacagactcggtaatcaggctcagcggttcgccgagatccagcgcgctctggctggtccatttaccggtacctttgttagccgcttcatccaggatcacatcaaccaggtagttaccgtcttcatcttttttggtgaagatatctttggtgatgtcgatcaggtaactgctcagttcaccgttattccactcggtaaaggtctgcgccagttcttcgttggtgaggttcaggccacctttaagcagagaataggcttcagcaatcagctgcatatcgccgtattcaataccgttgtgaaccatcttcacatagtgacctgcgccatcggcaccaatataggtaacgcatggttcaccgtcttcagctacggcggcgattttggtcaggatcggtgctaccaattcataggcttctttctggccaccaggcataatagaaggacctttcagcgccccctcttcaccgccagaaacaccggtaccgatgaagttaaagccctctgcactaagctcacgattacgacgaatagtgtcctggaagaaggtgttaccaccatcaatgatgatgtctcctttatcgagatatggtttgagggaatcaatagcagcatccgtgcctgcacctgctttcaccattaacaggatgcgacgaggcgtttccagagattcgacaaactctttcaccgtatagtaaggaaccagtttcttgcctggattttcggcaatcacttcttccgtcttctcacgggaacggttgaaaatagagacggtataaccacggctttcgatgttgagcgcaaggttgcgtcccatcactgccataccgactacgccgatctgttgcttggacattacatactcctgtcaggtgtgatcaccgcgctgaatgctcgcggcctggaatgttcgcaaataagtatacaaagtacttattaaagtataaatagcttatccatgcttatatgcttacggctttatatgtctccacatgcgatatttcttaaataatgttttattattaccacttttaattcagggataatgtgaggttattaccctcaaataatatgagataaatagtgctgcaacattgcatttttgccccgatttatccatgatcgaattgtgacatttgtcatacaacgaataggttttgtacttactatggaatggattgccgatccgtctatctgggccgggttaatcacgctgattgtgatcgaactggtcctcggcattgataacctggtctttattgccatcctcgccgaaaaactaccgccgaagcagcgtgaccgcgcacgggttaccgggctgctgctggcaatgttaatgcgcctgttactgctggcgagtatctcctggctggtcaccctgactcaaccgctgttcagcttccgcagctttacctttagcgcccgcgacttaatcatgctgtttggtggtttcttcctgttgttcaaagccacgatggagctgaacgaacggctggaagggaaagacagcaataatcccacacaacgcaaaggtgcgaagttctggggcgtggtgacgcaaattgtggtactggacgccattttcagtctcgacagtgtgattaccgccgtcgggatggtcgaccatttactggtcatgatggccgccgtggttatcgctatcagcctgatgttgatggccagcaagccgttaacgcaatttgttaacagtcacccgacgatcgttattctctgcttaagcttcctgttgatgattggctttagcctggtggcagaaggtttcggcttcgtcattccgaaaggctacctgtacgctgccattggtttcagcgtgatgatcgaggcgctcaatcagttggctatctttaaccggcgacgttttctttccgctaaccagacgctgcgccagcggactaccgaagcggtaatgcgcctgcttagcgggcaaaaagaagatgcggaactggacgccgaaaccgcgtccatgctggtggatcatggtaaccagcagatctttaatccgcaggaacggcggatgattgagcgggtacttaatcttaaccagcgtaccgtcagcagcattatgacgagccgccacgatattgagcatatcgatctcaacgcgccggaagaagaaatccgccagttgctggagcgaaatcagcatacgcggctggtggttaccgacggtgatgacgcagaagatttgctcggtgttgttcacgttatcgacctgctacaacagtctctgcgcggcgaaccgctcaacctgcgggtgttgattcgccagccgctggtgttcccggaaaccttgccgttgttacctgccctggagcagttccgtaatgcccgcacgcactttgcttttgtggtggatgagtttggcagcgtggaagggattgtgacattaagtgacgtcactgaaaccattgccggtaacttaccgaacgaagtggaagagatcgacgcccgccatgatattcagaagaatgcggacggttcctggacggcgaatggtcatatgccgctggaggatctggtgcaatatgtgccgctgccgctggatgaaaaacgtgaatatcacaccattgccgggctgttgatggagtatttgcagcgtattccaaaacctggcgaagaagttcaggtgggggattatttgcttaaaacgttgcaggtagaaagccatcgcgtgcagaaggtgcagattataccgctgcgtaaggatggcgagatggagtacgaggtgtgatggtatcggtcattttacccaatagccgaaaggaataagatgagggaaccgcgccatcggcgatttaccgccgggagcccgggttgccagggtggtggagattgagccaccctggcacgttcaccggcttgagcgttccatagtagcgaggaacatcaagtgaacggaacagccttcgatcttacatattcagaatataatgatgccgccacgaacgcctgatgcgacgctttacgcgtcttatcaggcctacaggactggtcacctggtaacttacatcttctccagcaacttcttcacatctttgccattacgggaatctttattccgctcggcccagtcattcaggcgacgtttcgcttcgtcctgtagatgtttgcgcagtaactgatccacttgcaggctgtaattgagttgctgccagttgccataaacccgcagcggtactggcgtttctttcaggaaatcaatcagtttgctttccccgttccagccacccacgacccgaatatcaaactgggtgtcgcaggtttgatctgccagattcaacatgccttcccctgtcagcgccagcacagggctttgaccttgcatgtcgtttaacgtcacgacgccatccttcaacgtcaaatcggtggtaaagcggtcaagccgcgtcacgttatcaaagttttcagcggccttcacatcaccgccattacgctctaccgcttgctgaatcatctgctggaagttcatcccttccatgcgcgtgtcggtcatttcgacatgtgcctgtccttgccagttgtggcggaatgcgtcggcatctatgtcagcaccggagaaatcaccagccagactcatttttccggtcaagctaatcggatagttaaacgccttcagaatggtaccaatctcaacgttttccagccgtggctggaagtttatccgcggatttatacttgtcgcgtccagcgtgcccggcagactaacctgtccaccgttaagtttgccctgcagttgagtaatttccagcaaaccgctcttgttggtcatttgcgtggcaacatctgtaaaattcattccgcgccagcgcacgttactggcctgcaacaaaatatcagccgtaaagccttgcagtccctgataggccggttcatcaatacggctagaaatgaccgggcgcggcaacgtactttggctctgcccctgctgcgcggcaccgttttcaccattcgcggtttcattaagcgggatgaggttgtcaagattcagttgcgggaattgcagcctcagctgccattccggtttctctgtcagcgtaacctgtgcttgcccgcttagcgtactatcattggcggtcaaactaatttggttaaaactaaggcgtttatgactctcctgccactgggcctggaaactcccctgcccctgaataccttgttttggtaaatcggcaccctgcaactgccagttaatttgttcaatagccgccgttaaatcatgcggataatcagaagcatctaccgtaccgttaagggatatcgtgagatcgcgctgatcgcgattaacccgcccggagaactcaaaactaccacgatgttggggatcttgttccatttgcaggcgaatattgcggattgtcacctgctcgtcatcttcatgctggaacaccagcacgctgtccgccaccttaagactggatatatcaaagctccatccgcgatcgtcactcagatccggcaaggtattgtcgcgcggtgcaaccggagcgtcttcactgcgcaccgcttccgtctgcggcgtcagttggatcactgccccttttagcatcacctgcttaacgctcagttgatgactcagtagtggtaaaagcgccacgtccagacgcatgttgtcggcgcgaaccagtggctggcttgcgccctgggcggtgagagacattcgcccggagaggatactaagctgcggccagacgtgccaacgcagtggcccgtcgagctgcaattgataaccgctacgtgcagcaacttgcttgaccatatagtcgcggaaatcattcggattcaccagcaacactaacgcagataacccggccaccagcacgaccaggagtatcatcagcgtcgtcagaaatcgtctcatggtatcctcaatgggcctgaattagtctttatcgattcggctggctaccgcgccctgctggttgcgatatttcgcatcttcacggcggttgtaaggtcgcaccgccgggccggaaagcggctcaaagctcagcgcaccaattaacatgcccggacgcagcgccagcggcagcttaccggagttgtagaactccagcacaatgcaaccagaccagcccggatcgatgcggtgcgcggtgacgtgcaccatcagccccagacgcgccagactggaacgcccgtccagccagcccaccagatcggctggcagcgtcacgctctccagcgtcaccgccagcgccagctctcctgggtgaagatagaacgcctcgccctcgtcgagaacgatctcatcgctcatcacgcggtcaagcgcggcgctcacttcatctttgggaccgctcagatcgataaacgctgccgtgtgaccacggaaggtacgaaatttattgcccaggcgtacatccaccgtcgcgccgttaatacgctccactggcggacgtgggttgatgctcaaacggccttcatcaagccaggcttcaatatctcggtcacacagacgcatggcattttctcctttcgcgcatcactcccttaacgccaattacgtcaagggcatactaggttatcactgaacggtacacaatttatcaagcttattcaaagaactgacttattttcgctttcaatatatcgatcgcgatgcggtttttcccgccgcgcggcacgataatgtccgcatattgtttagaaggctcaatgaattgcaggaacatcgggcgcacggttttttgatattgcgccatcacactatccatactacgcccacgctcgttaacgtcacgcttgatgcggcgcatcaggcagatatccagcggggtatcaacgaaaatggagaagttaagttcgtcacgcaaacgcgcatccgtcagcaacaaaatgccttcgagaatgatgaccttcttcggctcaaccgtcaccgtttctttcatacgcgtatgttcaacatagctgtaaaccggcaggtcaattgcgctgccgcgtttcaacgcttgtaaatgctcaagcagcagactgtgatccatcgcgctgggatggtcgtagttggtcttaacgcgttcttccatgctcagatggctttgatctttgtaatagcagtcttcgggaattacgccgatgtgttcatcaccgacttgctcacgcaattcacgataaagggtactggcaataagactcttgccggaagcgcttgcgccagcgataccgataatgacgcactgatgagactgatcagtcatatatttagcgacctgattaacctggatgttaggaagggggcgacgaagcgccaaacgcggcaattatagggatttcatccgtctgataccagtcgaatagcgttgccgcgcgctcagagttaattgttgacaaagaattcccgggggcaaattacgttgatcagttttatgtaaggtaaaaaatgttaaacgcagttgcgcaaattatccgcctttacgtcactttatgagcaattcgcatataaaatgtaaaacttttgtactagcataaacacagaaacgaatactggcgaccaggtcttgcggataaagcggtaatgagcaaacaaagtcagcatgtattaattgccctgccccacccgctgcttcacctggtcagtttaggtttagtcagctttatctttacccttttcagccttgagcttagccagtttggcacccaactcgccccactgtggttcccgacgtccatcatgatggtggcgttttatcgccatgccgggcgcatgtggccgggaattgcgctgagctgtagcctgggaaatatcgccgcatccatcctgcttttttccaccagcagcctgaacatgacctggacgaccatcaatattgttgaagccgtggtcggggcagtgctgctacgtaaattgctgccgtggtataaccccttgcaaaatctggctgactggctgcgtctggcactcggcagcgccattgttccgcctctgttggggggtgttctggttgtcctgctgacgcccggagacgatcctctcagggcatttttgatatgggtactgagtgaatccatcggcgctctggcactggtgccgctgggattgttatttaaaccacactatctgctgcgccatcgcaacccacggttgctttttgagagcctgctcacgttagccatcacactgacgttaagctggcttagcatgctgtatctgccgtggccttttactttcattattgtgctgttgatgtggagcgccgtgcgtctgccacgaatggaagcctttttgatcttccttaccacggtgatgatggtgagcctgatgatggccgcggatccccccctgcttgctacgccgcgtacgtacctgatgagccatatgccgtggctaccgtttttgctgatcctgctgcccgccaacatcatgaccatggtgatgtatgcctttcgtgcggaacgcaaacacatttccgaaagcgaaacccactttcggaacgcgatggaatattccgctatcggtatggcgttagtgggcaccgagggacaatggctgcaaaccaacaaagcgctctgccagtttctcgggtacagtcaggaagagctgcgcggactcacctttcagcaactgacctggccggaggatctcaataaagatctccaacaggttgaaaagctgataagcggtgaaataaacacctatagtatggaaaaacgctactacaaccgcaatggcgatgttgtctgggcgttgcttgccgtcagtctggtgcgccacacggatggcacgccgctctattttatcgctcagattgaagacattaacgagctaaaacgcaccgaacaggtcaatcagcaactgatggagcgcatcactctggctaacgaagcgggcgggattggcatctgggagtgggagttgaagccgaatatttttagctgggataagcggatgttcgagctgtatgaaattcctccacatatcaaaccgaactggcaggtgtggtacgagtgcgtgctgccggaagatcgccagcatgccgaaaaagtgattcgtgatagcttgcaaagtcgcagcccctttaaactggaatttcgcattaccgtaaaagacggtattcgccatatccgcgccctcgccaaccgggtactgaataaagaaggcgaagtcgaacgtctcctcggcatcaatatggatatgaccgaagtgaaacagcttaacgaggcattgtttcaggaaaaagagcgcctgcacattacgcttgattccatcggtgaagccgtggtctgtattgatatggcgatgaaaattacctttatgaatccagtggcggagaagatgagcggctggacgcaggaagaagcgttaggtgttccgctcctgacggtgttgcatattacttttggcgacaacggaccattaatggagaacatttacagtgccgacaccagtcgttccgcgatcgagcaagatgtggtgttgcactgtcggagcggcggcagttacgacgtgcattacagtattacgccgttaagtactctggacggcagcaatattggtagcgttctggtgattcaggacgttaccgaaagtcgcaaaatgctgcgccagctgagctacagcgcctcccatgatgcactgacgcatctcgccaaccgcgccagttttgagaaacaactgcgtatcctgctgcaaacggtaaacagtacacatcagcgacatgccctggtgtttatcgatcttgatcgctttaaagcggtgaatgacagcgccgggcatgcggcgggtgacgctttgctgcgcgaactggcgagcttaatgctgagtatgctgcgttccagcgacgtgctggcgcgactcggtggggatgaatttggtctgctgctaccagactgtaatgttgaaagcgcgcgttttatcgctacacgcattatcagtgccgtgaatgactatcactttatatgggaaggccgtgtgcatcgggtaggtgccagtgccgggattaccttgattgatgacaacaatcatcaggcggcagaagtgatgagccaggctgatatcgcctgttatgcctccaaaaatggtggccggggccgggtgacggtttacgaaccgcagcaagctgccgcacatagcgaacgggcggcgatgagccttgatgaacagtggcggatgattaaagagaatcagttgatgatgctcgcccacggtgtcgctagcccacggatcccggaagcgcgtaatttgtggctgattagtcttaagctctggagttgcgaaggcgagattattgatgaacaaacatttcgtcgtagcttcagcgatccggcgcttagccatgctcttgaccgccgggtattccacgaatttttccagcaggccgcaaaagcggttgccagtaaaggcataagcatctccctccccctttccgttgccggtttgagtagcgccacgctggtgaatgatctgcttgagcagctggaaaatagccctctaccaccacggttattacatctgattattccggctgaagcgattttagatcacgcagaaagcgtgcaaaaactgcggctggcgggatgtcggatagtgctcagccaggtgggccgcgatctgcaaatcttcaacagcctgaaagcgaatatggcagattacctgctacttgatggtgagttatgcgccaacgtgcagggtaatttgatggatgagatgctgattacgattattcaggggcacgctcagcgactcgggatgaaaaccatcgccgggccagtcgttttacccttagtgatggatacgctttctggcatcggcgtcgatctgatttatggtgaggtgattgccgatgcccaaccgctggatttgctggtgaatagtagttatttcgcgattaactgaggcgtgcttccccatcgcctgatgcgacgctaacgcgtcttatcatgcctacaaatcgctcattccccaggccggataaggcgctcgcaccgcatccggcgaccaacgtcatgcttcgtctggttgccagccttccgtataccagatatgcaacagcgcataagaacgccagggcttccagcgctcggcataacggcggatttgcgccggtgtcattcccggaaatcgctgtttaatcagataatcatccggcaggaaaacatctttcgcctgccagccacgcaaagcaaaataattcgccgtccagcgcccgatacccggaaaagtttgcagcgttttcatcgcctgctccacatcgcccggtattgtcattggtaaggtgccctccagcgccgcatttgccagatgaatcagcgcctctgcccgtttcaacggcatacctaacgcttttaatgcctgcgggtctgctgctgccagccgctgaggcgtcgggaagcagatatactccggaaaatcatccagccgttcgccataaagctgtgccactctggcggtcaattttgccgccatcgccacgctcaccagttggcctaaaatcgcccgcacgccctgctcaaaagcatcaacacagccgggtaaacgcaatccgggccgcgccgcgcctaacctgcccaacgcaccgttaacaatttgtgggttacattgcagatcaaacaggcggctcattttcgccagacactctgcggcaacaggttctaaacctgcacttaaatttatgtgcagagtatggcgggctatatccggaatagcagtcaccacgccgcgatattcgcccaccgccagactacgggcataataactgtccgcgaccgtttccacactgctcaccgcacgggcggcgagaaatcccaacatccagctccagtcatacggcggctgccagttcagggtatacatcgcatctccttattcatccgctttcagcataaacgttattcagacgctgcgctttgctttcatattccggttgtcgcgacggcaacatttcgctaaagtcacgccccttcttcaccggcatggggattatttcgtgtttattggttttgattacggtacagcaaactgtagtgtggcggtcatgcgtgacggtaaaccgcatttgctaaaaatggaaaacgacagcacgctgctgcctagtatgctttgcgcgccaacgcgtgaagcggtaagcgaatggctgtaccgccatcatgatgttccggcagacgacgatgaaacgcaggcgctgttacgtcgggcgattcgttataaccgcgaagaagatatcgatgttacggcgaaaagcgtgcagttcggtctttccagtctggcacagtacattgatgatccagaagaagtgtggtttgtgaaaagtccaaaaagcttcctcggtgccagcggcttaaaaccgcagcaggtagcgctgtttgaggatctggtctgcgcaatgatgttgcacattcgccagcaggcgcaggcacagctgccagaagcgattactcaggcggtgattggtcgtccgatcaacttccaggggctgggcggtgatgaagcaaacacccaggcgcaagggattctggaacgcgcggcgaagcgtgccggattcagggacgtggtattccagtacgagccggtcgcggctgggctggattacgaagccaccttgcaggaagaaaaacgggtgctggtggtggatatcggcggtggtacgactgactgtagtttgctgctgatggggccgcagtggcgtagccgtctcgatcgtgaagccagcctgctgggtcacagtggttgccgtattggcggtaacgatctggatatcgcgctggcgtttaaaaacctgatgccactgctgggtatgggtggcgaaaccgaaaaaggcatcgccctgccgatcctgccgtggtggaatgcggttgccatcaacgacgtacctgcgcagagtgatttctacagtagtgccaacggtcgtctgcttaacgatctggtacgcgatgcccgcgaaccggaaaaagtggccctgttacagaaagtctggcgtcagcgtttaagctatcgcctggtgcgtagcgcagaagagtgcaaaattgctcttagtagcgtagcggaaacccgcgccagtctgccgtttatcagcaatgaactggctacgctgattagccagcgagggctggaaagcgccctcagccagccactgacgcggattctggaacaggtgcaactggccctggataacgcccaggaaaaaccggacgttatctacctgaccggcggtagcgcccgttctccgctgattaaaaaagcgctggcagaacagttgccgggcattccgattgcaggcggcgatgactttggctccgtcaccgccgggctggcacgctgggcggaagtggtgtttcgttaattgaaaaatggctcagcagcggcttaaatctgcctgcgcctgagccagtttttctgctgcctgacgtaacggttccatcaacggcatggtccgtgctggagcatgaaggcggaatcgctgcaactctgtcgcgccgactgtcaacgcgctttccagccgatgtcgtttggcggtcattttcgccattaccgcttgtctgtctgctggcgttatcgcttcattcggcctgaacacaaaacggcgttcacagctcgctttccagtcgataaccgcctgggtcagatggtcgccaaaccctttcacttgcttaacgccacgacgggtaacatctgcggctgtttcaataccaaaagaccgtaacgccgctttacgcgcagggccaacgccgggaatagaggcaacatcaataaaaaatccctccagaaacttctgcttctgccgttcccttgcagtgtcatgaagtgctgccagagcgcgtttctcttcttccggtaacccgagaatttcgtccttcattttttcgagcatcgtccgtttggcgataaaaccttccaggccgcctacctgctggatctggcggactaaatggtcatagtccattttcgcacgattaaatgcctcacggcgttgctgaacttctgctttgtacgctttgcttgtcagactgccaataatccagatagccgccagcacaggaaccaaaataatataacgcggttctgcctgaaggccgcaaagcagcaggcttaatgcactcagtgcgatctcaagcagaatgatgtattcgcgccgtaacaggcctaaaggaagcggcctgccagtcggttggaaatgatcgggtaatggcagttgcaatgctggcggtgctacactcgccatcaccatcgcccagactttcgccagcacaaaattcccgccggtggtaatgacctcttcgccgagatcaataaaatagataacaccttgattatccagcgcacaccacgggcagtcagtcaaatgagcggggtaaacatgcattgcactaacgatacatttctttaactgttggcgtagagagtccagtgccgctacccacgctttagccgtcggacgcccggttgccacgccactttccgtgaatgcctgctgaaacatggcttcaacatcactcggtaacatgcttagcggaatagatcgtggcggcggttttaaaccacgtcgctgattatcactcgcgtaggcataacggaaatgggtaatatccgtctccagcgcattacccgcatcagagataagcggcacaccagaataaggatgccgcccaccaaacaagacgtgaaaaattagcaacgcaaggccaaaattatcgtgattttctgtgcgttcaaaaccgacaaaacttggcaaggtttgtagctctggcggcgtaaaatggctcacgccgacttcgcataaatgcagtgtgccattggcgttaatttgaaaggagtcgctatcaatcagtaccactttgctgtcgcgacctaccataaaactgttctggtttacgtcacccacgacgtgcccgtgctcgtgaaccgtagcaaaagaactagcaatattgcgcgcaacatagagtagaaaatcccacgcacaatgagggtaactctggcgacgatgtgccgggctatagatcatatgaatcggttctttaccagaaacttttggcatcataaaaccgataacttttccgcctcgtccaccgtgaagcgttgcctgcggccaggcgacataattcaacaactgcgcgtcagctgtcgcagccataaaggcaagtttgtcctgttttaaggcgggtggcggcgtgtgataaatcttggcgacgctatcgacaaactcctcgatatcataaaccgcgccttcaccacctttgcccagttcacggccaagagtggtcaattcacctgtgcttgtaaatacttttatatttgttttcataatatttcgcgggtagttatattatatttcaatgaataataacaactaaccattaaaattatttctatatggggaaaacccactcaagaataaaaatgataatgcaattttatcaggatacaattcaatttcggcctgataatgattaacttccacaggtttttgctaactttgactacaaagggattctggagaaaaaatgaaaaagatattacttatgttgagtctgctattttttactaccgcgggctttagtgaagttagcgatacgttagtgacgggaggttatgataaacaagcgatgtctgacgcgattaaacatgcgcggaaagaaaccgataaattcatcgaggttatgaataaaaaagatgccgatactttcgcagtcaaagccccgataaccgatcacggaagaaccgagcatttctggcttacggatgtcacttattctaacggcatgtttattggcgtaatcagcaatgaccctggtattgttacaaacgtagaatatggccaggagtggaaaatcaagaaagaagatattagtgactggatgtatacgcgcggggataaaatttacggcggttataccattgatcctttattggtcacctatccaaaagaagaagccgacgagctaagagcaaaattagttcgctaatcagccgttatatttattgtttaaactggcggttgaattgttgtcttcaaccgccatgagaaactcactctgcccacagcgccagtgccaacgttttatcatcatccgtacgctcgtttaccgccgggctggacaaaaactgctttaacaattcaggtaataaatcgagttgttcctgcgttgctgccgccagtccattgaaaaacggggtaaagaaaggcacatgaggagaattatccagcatatttaacgccagtcgctggataccatccgtaaatgctgcaactttgtgcgcacgcccagtgctggtgagagtttccagtctggaaacggcatcttcgtcggtaatgaagtgcgtcatgttggcatattcacccgccatcggcgtgagaggcaattgcagaccgtgacccaaatctaccaccacgccgccatcgccaatctgcataatcaaggtgccgtcagggctactaatcagtcccagaaatgtgcaggcaaaatcgcgaaccgctaattctttggcttccgcctcggcaaaaagtcgttgacgaatggtcagtaccatatttgtggcgaggacatcattaagccccaattccccgccctgcactttttggctcatataagccatcgcttcattgacggcgagcatcgcgccttcgccaccctggctgacactgcctgcgccatcagcgacaaatacgctcaataatggctgctggtcatttaaccaggcaatctgcatctggcaggcatcctgacaaggcaagtccgcgctgatgtggctcgttccaacggtacttgcatagaccagacgccagctcacacactcgtccagccttttggcgcttccagcacaacttccgttcccggcgtggagcgggaaacgctacgcaggctactggataaccagctaaacagttcacggaattgtaatccttgcagaggcaaaggctgacgaacgctaatttgtgccagcgtcttcatatccgccccctgaacaccgatggaaaagaaagcaaaccttttatcttcttccccccgaaacactttgttggctgcagcctgccactcatcggttggtgcaccatcggtaatcaggaaaatccacgggcgataatagctaataccatttgcacgatactcacgtttccgctcctctaccatatccagggctttggtaatggccgcacccattggtgtatcgccctgggcaaacaggatgggcggaaaaaaattagcggcgctggtaaagggttgttccacatgcaccgggccgaacgtcacaatgccgagttccactctttttaaagccagcggatcagcaagcagttcatcacgaaaggtaaccaatccggcgttaagttcattaataggtctaccgttcatagaaccagaaacatccagcagcaaaatgcaggggcaacgtggttccgggttactggcaaaatcgctggtggcaaacgtgatttgttcgctcataagaaatcctttcttagagaattatcgaggtccggtatcataccgactgcaataatgaaataagagcaaacgaagaaactttcagaattaggcccggcggcgcagaaaattttgctattcgcctcgcaagaacggagagccgtcgattgacactaagggcggagtgacataatttcaggagtgagggttagggagaggtttccccctccccctggtgttcttagtaagcctggaagctaatcactaagagtatcaccagtatgatgacgtgcttcatcataaccctttccttattaaaagccctcttctccgggagaggctttcccgtttcagcgtcccgctgaaatcatcggcttacctcctttcgccctgaatgcagtctatcgctaacgcgtgaataaaatagtttcctctgtgattattgcgtaacgactcgcaaagaatatttgctggcaggatcgcagactacaaagcctgcggattgacaatcttatcgtgaagacatactttcaggagtgagggtagagcggggtttcccccgccctggtagtcttagtaagcggggaagcttatgactaagagcaccacgatgatgagtagcttcatcatgaccctttccttatttatggccccttcctcgggaggggctttcccgtttcagcgtcccgctgaaatcgtcggcttacctcctttcgccatgcaagcagtctatcgctaacgcgtagataaaatagtttcctgtgttattactggatgcgtgctcgcaaatgtgcccgtcattcagacgattccagacagtgtttcataattcctccatttttctcccttattggctggctacactagtatcattccgcgaaacgtttcaggaagagaaactcttaacgatgaaaggtagttataaatcccgttgggtaatcgtaatcgtggtggttatcgccgccatcgccgcattctggttctggcaaggccgcaatgactcccggagtgcagccccaggggcgacgaaacaagcgcagcaaagcccagcgggtggtcgacgtggtatgcgttccggcccattagccccggttcaggcggcgaccgccgtagaacaggcagttccgcgttacctcaccgggcttggcaccattaccgccgctaataccgttacggtgcgcagccgcgtggacggccaactgatagcgttacatttccaggaaggccagcaggtcaaagcaggcgatttactggcagaaattgaccccagccagttcaaagttgcattagcacaagcccagggccaactggcaaaagataaagccacgcttgccaacgcccgccgtgacctggcgcgttatcaacaactggcaaaaaccaatctcgtttcccgccaggagctggatgcccaacaggcgctggtcagtgaaaccgaaggcaccattaaggctgatgaagcaagcgttgccagcgcgcagctgcaactcgactggagccggattaccgcaccagtcgatggtcgcgttggtctcaagcaggttgatgttggtaaccaaatctccagtggtgataccaccgggatcgtggtgatcacccagacgcatcctatcgatttagtctttaccctgccggaaagcgatatcgctaccgtagtgcaggcgcagaaagccggaaaaccgctggtggtagaagcctgggatcgcaccaacagcaagaaattaagtgaaggcacgctgttaagtctagataaccaaatcgatgccactaccggtacgattaaagtgaaagcacgctttaataatcaggatgatgcgctgtttcccaatcagtttgttaacgcgcgcatgttagtcgacaccgaacaaaacgccgtagtgatcccaacagccgccctgcaaatgggcaatgaaggccattttgtctgggtgctgaatagcgaaaacaaggtcagcaaacatctggtgacgccgggcattcaggacagtcagaaagtggtgatccgtgcaggtatttctgcgggcgatcgcgtggtgacagacggcattgatcgcctgaccgaaggggcgaaagtggaagtggtggaagcccagagcgccactactccggaagagaaagccaccagccgcgaatacgcgaaaaaaggagcacgctcctgatgcaggtgttacccccgagcagcacaggcggcccgagccgcctgtttattatgcgtcctgtggccaccacgctgctgatggtggcgatcttactcgccgggattatcggttatcgcgccctgcccgttagcgcgctgccggaagtggactatccgaccattcaggtggtcacgctctacccaggtgccagcccggatgtcatgacctctgccgttaccgcgccgctagaacgccagttcgggcagatgtctggcctgaaacagatgagcagccaaagttccggcggtgcgagtgttatcactttgcagttccagctaacattaccgctcgatgtcgccgagcaggaagtgcaggccgcgattaacgctgcgaccaacttgttgccgagcgatctgcctaacccgccggtttacagcaaagtgaacccggcagatccgccgatcatgacgctcgccgtcaccagtaccgccatgccgatgacgcaagtggaagatatggtggaaacccgcgtcgcgcagaaaatcagccagatttccggcgtcggcctggtgacgctttccggcggtcagcgtccggctgttcgcgtcaaacttaacgctcaggcgattgccgccctcggcctgaccagcgaaaccgtgcgcaccgccattaccggcgctaacgttaacagcgcaaaaggtagcctcgacggcccttcccgtgcggtcacgctttccgcgaacgaccagatgcaatccgccgaagagtatcgccagctaatcatcgcctaccagaacggcgcgccaattcgtctgggcgatgtcgcaactgtagagcaaggtgcagaaaacagctggctcggcgcgtgggcgaacaaagaacaggccattgtgatgaatgttcagcgccagcccggtgctaacattatctccaccgccgacagcattcggcagatgctgccacagctcactgagagtctgccgaaaagcgtgaaggtgacagtgctttccgatcgcaccaccaatatccgcgcatccgtcgatgatactcagtttgaattgatgatggctatcgcgctggtagtcatgattatctacctgtttttgcgcaatattccggcgaccatcattcccggtgttgctgtaccgctgagcttaatcggcactttcgcggttatggtgtttctcgattttagtatcaataacctgacactgatggcgttaactatcgccaccggattcgtggtcgatgacgccatcgtggtgatcgaaaacatttcccgctatatcgaaaaaggcgaaaaaccgttggcggcggcgctcaagggcgcaggtgaaatcggctttaccattatcagcctgaccttcagtctgattgcggtgttgatcccactgctgtttatgggcgatatcgtcgggcgactgttccgcgaatttgctattaccctggcggtagcgattttgatcagtgcggtggtgagcctgaccctgacaccgatgatgtgcgcgcggatgctcagccaggagagcttgcgtaaacagaaccgcttctcccgtgccagcgaaaaaatgttcgacaggataatcgccgcctatggtcgtggactggcgaaagtgctgaatcatccgtggctgaccttaagcgtggcactcagcacgctgctgcttagcgtgctgctgtgggtgttcattccgaaaggtttcttcccggtacaggacaatggcattattcagggcactttgcaggcaccgcaatccagctcctttgccaatatggcccagcgacaacgccaggtcgcggacgtgattttgcaggatccggcagtgcaaagcctgaccagttttgttggcgttgatggcactaacccgagcctgaacagtgcacgtttacaaatcaacctcaaaccgttggatgaacgtgatgatcgggtgcaaaaagtcatcgcccgtctgcaaacggcggtagataaagtgccgggcgtcgatctcttcctgcaaccaacgcaggatctgactattgatactcaggtcagccgcacccagtaccagtttaccttgcaggccacgagtctggatgcgctcagtacctgggtgccacagttgatggaaaaactccagcaactgccacagctttctgatgtctccagcgactggcaggacaaagggctggtggcgtatgtcaatgttgatcgcgacagcgccagccgtctggggatcagcatggcggatgtcgataacgccctgtacaacgcgtttggtcagcggctgatttccactatttatactcaggccaaccagtatcgcgtggtgctggagcacaacaccgaaaataccccaggcctcgcggcgctggataccattcgcctgaccagcagcgacggcggcgtggtgccgctaagcagtattgccaaaattgagcagcgttttgcgccgctctccatcaaccatctggatcagttcccggtaacgaccatctcctttaacgtgccggataactatagcctgggcgatgcggtgcaggcgattatggacaccgaaaagacgctgaatctgccggtggatatcaccacgcagttccagggcagcaccctcgccttccagagcgcgctgggcagcactgtctggctgattgtcgcggcggtggtggcgatgtatatcgtgctcggcattctgtacgagagctttattcacccgatcaccattctcagcacgctacccaccgcaggggttggcgcactgctggcgttgctgattgctggtagcgaactggatgtgattgcgattatcggcattattttgctgatcggtatcgtgaagaagaacgccatcatgatgatcgacttcgcgctggctgctgagcgcgagcaaggcatgagcccgcgcgaggcaatctaccaggcttgtctgttgcgttttcgtccgatcctgatgaccactctggcggctctgcttggcgcgctgccgctgatgttgagtaccggggtcggcgcggaactgcgtcgtccgttaggtatcggcatggtcggcggtctgattgtcagccaggtgctgacgctgtttaccacgccggtgatttatttgctgttcgaccgcctggcattgtggaccaaaagccgctttgcccgtcatgaagaggaggcgtaagtgaagttttttgccctcttcatttaccgcccggtggcgacgattttactgagcgttgccattaccctgtgcggcatactgggcttccgtatgctgccggtcgccccgctgccgcaggtcgattttccggtgattatcgtcagcgccagcctgcccggtgcgagtccagaaacaatggcgtcttccgttgccacgccgctggagcgcagtcttgggcgcattgccggagtcagtgaaatgacctccagcagtagcctcggcagcacgcgtattattttgcagtttgattttgaccgggatatcaacggcgcagcgcgtgatgtgcaggcggcgatcaacgctgcacaaagtttgctgcccagtgggatgcccagccgcccgacctatcgcaaagcgaacccgagcgatgcgccaattatgatcctcacgctgacgtccgatacttatagccagggtgaactgtacgatttcgccagcacgcagctggctccgacgattagccaaatcgacggtgttggtgatgtcgatgtcggaggcagcagtctgcccgccgtacgcgtcgggctgaatccgcaggcgctgtttaatcagggcgtgagcctggacgacgtacgcaccgccgtcagcaatgccaacgtgcgtaaaccgcagggcgcgctggaagatggcactcaccgctggcagatccagaccaatgatgagctaaaaaccgccgctgaatatcagccgttgattattcactacaacaacggcggcgcggttcgtctgggcgatgtggcgacggtgaccgacagtgtgcaggatgtgcgcaacgccgggatgaccaacgccaaaccggctattttactgatgatccgcaaactgccggaagccaatattatccagacggttgacagcatccgggcaaaattaccggagttgcaggaaaccattccggcggcgattgatctgcaaattgcccaggatcgctcccccaccattcgcgccagcctggaagaagtcgagcaaacgctgattatcagcgtggcgctggtgattctggtggtgtttttattcctgcgcagcggtcgcgccactattattcccgccgttagcgtgccggttagcctgattggtacgtttgcggcgatgtacctgtgcggattcagtctcaataaccttagcttaatggcgctcaccatcgctactggtttcgtggtggatgacgccatcgtggtgctggaaaacattgcacgtcatctggaagcgggaatgaaaccgttgcaagccgcactgcaaggtactcgcgaagtcggttttacggtgctgagcatgagtctgagtctggtggcggtgttcctgccgctgctgttgatgggcggattgccgggccgactgttacgcgaatttgccgtgacgctttctgtcgccattggtataagcttgctggtttctctgacattaacgccaatgatgtgtggctggatgctgaaagccagcaagccgcgcgagcaaaagcgactgcgtggttttggtcgcatgttggtagccctgcaacaaggctacggcaagagtctaaaatgggtgctcaatcatacccgtctggtgggcgtggtgctgcttggcaccattgcgctgaatatctggctgtatatcagcatcccgaaaaccttcttcccggagcaggacactggcgtgttgatgggcgggattcaggcggatcagagtattagctttcaggcgatgcgcggtaagttgcaggatttcatgaaaattatccgtgacgatccggcagtggataatgtcaccggctttacaggcggtagccgagtgaacagcgggatgatgtttatcaccctcaagccacgcgacgaacgcagcgaaacggcgcagcaaattatcgaccgtctgcgcgtaaaactggcgaaagaaccgggggcgaatctgttcctgatggcggtacaggatattcgcgttggtgggcgtcagagcaacgccagctaccagtacacgttgttatccgacgacctggcggcactgcgagaatgggagccgaaaatccgcaaaaaactggcgacgttgccggaactggcggacgtgaactccgatcagcaggataacggcgcggagatgaatctggtttacgaccgcgacaccatggcacggctgggaatcgacgtacaagccgccaacagtctgttaaataacgccttcggtcagcggcaaatcagcaccatttaccagccgatgaaccagtataaagtggtgatggaagtggatccgcgctatacccaggacatcagtgcgctggaaaaaatgttcgttatcaataacgaaggcaaagcgatcccgctgagctatttcgctaaatggcaaccggcgaatgccccactaagcgtgaatcatcagggattaagcgcggccagcaccattagctttaacctgccgaccggaaaaagcctcagcgacgccagtgcggcgatcgatcgcgcaatgacccagcttggtgtgcctagcacggtgcgcggcagttttgccggcacggcgcaggtgttccaggagacgatgaacagccaggtgatcctgattatcgccgccatcgccacggtgtatatcgtgctgggtatcctttacgagagttacgtacatccgctgacgattctctccaccctgcccagcgcgggcgttggagcgctgttggcgctggagctgttcaatgccccgttcagcctaatcgccctgatagggatcatgctattaatcggcatcgtgaagaaaaacgccattatgatggtcgattttgcgcttgaagcccaacggcacggtaacctgacgccgcaggaagctattttccaggcctgtctgctgcgttttcgcccgattatgatgactaccctggcggcgctgtttggtgcgctgccgctggtattgagcggcggcgacggcagcgagctgcggcaacccctggggatcaccattgtcggcggactggtaatgagccagctccttacgctgtataccacgccggtggtgtatctctttttcgaccgtctgcggctgcgttttagccgtaaacctaaacaaacggtaaccgagtaaatgacagatcttcccgacagcacccgttggcaattgtggattgtggctttcggcttctttatgcagagcctggacaccaccatcgtaaacaccgcccttcccagtatggcgcaaagcctcggggaaagtccgttgcatatgcacatggtcattgtctcttatgtgctgaccgtggcggtgatgctgcccgccagcggctggctggcggacaaagtcggcgtgcgcaatattttctttaccgccatcgtgctgtttactctcggtagtctgttttgcgcgctttccggcacgctgaacgaactgttgctggcacgcgcgttacagggcgttggcggcgcgatgatggtgccggtcggcagattgacggtgatgaaaatcgtaccgcgcgagcaatatatggcggcgatgacctttgtcacgttacccggtcaggtcggtccgctgctcggtccggcgctcggcggtctgctggtggagtacgcaagctggcactggatctttttgatcaacattccggtggggattatcggtgcgatcgccacattgctgttaatgccgaactacaccatgcagacgcggcgctttgatctctccggatttttattgctggcggttggcatggcggtattaaccctggcgctggacggcagtaaaggtacaggtttaagcccgctgacgattgcaggcctggtcgcagttggcgtggtggcactggtgctttatctgctgcacgccagaaataacaaccgtgccctgttcagtctgaaactgttccgtactcgtacctttagcctgggcctggcggggagctttgccggacgtattggcagtggcatgttgccctttatgacaccggttttcctgcaaattggcctcggtttcagcccgtttcatgccggactgatgatgatcccgatggtgcttggcagcatgggaatgaagcgaattgtggtacaggtggtgaatcgctttggttatcgtcgggtactggtagcgaccacgctgggtctgagcctggtcaccctgttgtttatgactaccgccctgctgggctggtactacgttttgccgttcgtcctgtttttacaagggatggtcaacagcacgcgtttctcctccatgaacaccctgacgctgaaagatctcccggacaatctggcgagcagcggcaacagcctgctgagcatgattatgcaattgagcatgagtatcggcgtcactatcgccgggctgttgctgggactttttggtagtcagcatgtcagcgtcgacagcggcaccacacaaaccgtctttatgtacacctggcttagcatggcgttgatcatcgcccttccggcgttcatctttgccagagtgccgaacgatacgcatcaaaatgtagctattagccggcgaaaaaggagcgcgcaatgaagttctggcgacccggtattaccggcaaactgtttctggcgattttcgccacctgcattgtcttgctgatcagtatgcactgggcggtgcgtatcagttttgagcgtggctttattgattacatcaagcatggtaatgaacagcgattacaactgttaagtgatgcgcttggcgagcagtatgcgcagcatggcaactggcgcttcctgcgcaacaatgatcgctttgtctttcagatcctgcgtagttttgaacacgataatagcgaagataaacccggcccgggtatgccaccgcacggctggcgtacccagttctgggtggttgatcaaaacaacaaagtgctggttggtccgcgagcgccgattccacctgacggtacacggcgacccattctggtcaacggtgcggaagttggcgcggtgatcgcctcccccgttgagcggttaacgcgcaatactgatatcaatttcgataaacaacagcggcaaaccagctggttgattgtcgccctggcaacgttactcgcggcacttgccacttttctgctggcgcgcggtttactggcaccggtaaaacgacttgtcgatggcacgcacaaactggcggcgggcgatttcactacccgcgtaacgcccaccagtgaagatgaactgggcaaactggcgcaagacttcaaccagcttgccagcacactggagaaaaaccagcaaatgcggcgcgattttatggccgatatttctcacgaactgcgtacgccattagcggtgctgcgcggtgaactggaagccattcaggatggcgtgcgtaaattcacgccggagacggtggcgtctttacaggcggaggtcggtacactgaccaaactggttgacgatctccatcagttgagcatgtctgatgaaggcgctctcgcctatcaaaaagcaccggtagatttgatcccactgctggaagtggcgggcggcgcatttcgcgaacgattcgccagtcgtggcctgaaactgcaattttccctgccagacagtattaccgtatttggcgatcgcgaccgtttaatgcagttattcaataacttactggaaaacagcctgcgctacactgacagcggcggcagcctgcaaatctctgccgggcagcgcgacaaaacggtgcgcctgacctttgccgacagtgcgccaggtgtcagtgacgatcagctacaaaaattgtttgaacgtttttatcgcaccgaaggttcccgcaaccgtgccagcggcggttccgggctggggctggcgatttgcctgaacattgttgaagcacataatggtcgcattattgctgcccatagcccttttggcggggtaagcattacagtagagttaccgctggaacgggatttacagagagaagtatgaccgagttaccaatcgacgaaaacacaccgcgtattttgatcgtggaagatgaaccgaagctggggcagttgctcattgattatctgcgtgctgcgagctatgcgccgacgcttatcagccacggcgatcaggtactgccgtatgtgcgccagacaccaccggatctgatcctgttagatctgatgctccctggcaccgatggcctgacgctgtgccgggaaattcgtcgtttttctgacattccgatcgtgatggtgacggcaaaaatcgaagagatcgatcgcctgctggggctggagattggcgcagatgattatatctgtaagccgtacagcccacgggaagtggtagcgcgcgtcaaaaccattttgcgccgttgcaaaccgcagcgcgagttgcagcaacaggatgctgaaagcccgttgattatcgacgaaggtcgttttcaggctagttggcgcggtaaaatgcttgacctgacgcctgcggaatttcgtctgctgaaaacgctctctcacgaaccaggaaaagtgttctcccgcgagcaattgctcaatcatctttatgacgactaccgcgtagtaaccgaccgcaccatcgacagccacattaaaaacctgcgccgcaagctggaatctctcgacgccgaacagagttttatccgcgccgtttatggcgtcggttaccgctgggaagccgacgcctgccgcatcgtttaattttagcgacattattttgttagccggagatggcgttcagaccagatccggcaacattatcccacgcatggtcagcaaactgacattatctctccgccctggcaggcatcagaaaatcgctcatactttaatcggtaaacagcacctttagaatcctgtcgtttgttttcgatttcaaaatataatgaaattatttgtttttaaatatcgagataacgatcacaaaaacgacaatatgaaaattattcgaggagtgaaaggcaaaaaaacggcctcccgatagggaagccgtagcaaagtgcgcgtgtttttatgccggatgcggtgtaaacatacgtggcagtgctatgtaggcatgataagacgcttcagcgtcgcatcaggcataggttgccggatgcagcgtaaacgccttatccgtcctacggggtggtgttgttcgtataaggcgtatcaggcgatagtaattttgctatcgagataaacgtcctgcacggcgttaatcagtttcacgccgtcagccatgcttttcttgaacgctttacgtccaagaatcagccccattccgcctgcgcgtttgttgataaccgcagtacgcactgcatcgctgaggtcagtttcaccgcccgcagcaccgccggagtttatcaacccagcccgacccatatagcagttagctaactgataacgcaccagatcaatcgggttttcgctggtcaatttgctgtaaacacgatcgtcggtgtaaccgtaattaattgctttatagccgccgttattttccgccattttttgtttgacgatatctgcaccgatggttgccgccagatggtttgcctgaccggtcaggtcggcggaaacatggtaatcaacgccatctttcttaaaggcggagttacgcaaataggcccacagcactgtcaccatacccagctcgtgcgcacgttcaaaagccgcagaaatttcttcaatctggcgacgactctcttcgctgccaaaatagatagtcgcaccaaccgcaaccgcgcccatgttgaacgcctgctccacgctggcatacagcgtttgatcgtaggtattcgggtaacttagcgtctcgttgtgattaagtttgacgaggaatggaatgcgatgcgcataacgccggcttacgctcgccagcacgccgtaagtactcgccacacagttacagcccgcttcgatcgccagttcaacaatgtttttcgggtcaaagtagagcgggttagcagcaaaactagctccggcagagtgctcaacgccctggtcaaccggcagaatagaaagatatcctgtgccagccagacgcccggtgttgtacaacgtctgcatattacgtaacaccgctggcgggcgattattgtcaatcattacgcggtctacgtagtcatgtccggggagataaagctggtcagaaggaattgtcatacaacggtgctgtaaaaggttgtcggcgtctttgccaagcaactgcgcaatatctgtcattactatgctcccgtaaattccgattggatatcggctatggattgtcctggcccgccttttgcgggcaatcataatcctggtcgttacgggcgagtttttccatcttttggatgttttttcagcgttttctgttggctcgattcatcagaaaaaatgttagcgcggtcaagttttcaccgcaaaggtatttaaaaggtattattaagtggtattgtcatcgcgtaccttacattacctgtcatgaaggaattaaaagatgaaaacaacagcaaagctgagcttcatgatgtttgttgaatggtttatctggggcgcgtggtttgtgccattgtggttgtggttaagtaaaagcggttttagtgccggagaaattggctggagctatgcctgtaccgccattgcggcgatcctgagcccaattctggttggctccatcactgaccgctttttcagcgcgcaaaaagtgctggcggtattgatgttcgcaggcgcgctgctgatgtatttcgctgcgcaacagaccacttttgccgggttcttcccgttactgctggcctacagcctaacctatatgccgaccattgcgctgactaacagcatcgcttttgccaacgtgccggatgttgagcgtgatttcccgcgcattcgtgtgatgggcactatcggctggattgcctccggtctggcatgtggtttcttgccgcaaatactggggtatgccgatatcagtccgactaacatcccgctgctgattaccgccggaagttctgctctgctcggtgtgtttgcgtttttcctgcccgacacgccaccaaaaagcaccggcaaaatggatattaaagtcatgctcggcctggatgcgctgatcctgctgcgcgataaaaacttcctcgtctttttcttctgtagtttcctgtttgcgatgccactagcgttctattacatctttgccaacggttatctgaccgaagttggcatgaaaaacgccaccggctggatgacgctcggccagttctctgaaatcttctttatgctggcattgccgtttttcactaaacgctttggtatcaaaaaggtattattgcttggtctggtcaccgctgcgatccgctatggcttctttatttacggtagtgcggatgaatatttcacctacgcgttactgttcctcggtattttgcttcacggcgtaagttacgatttttactacgttaccgcttacatctatgtcgataaaaaagcccccgtgcatatgcgtaccgctgcgcaggggctgatcacgctctgctgccagggcttcggcagtttgctcggctatcgtcttggcggtgtgatgatggaaaagatgttcgcttatcaggaaccggtaaacggactgactttcaactggtccgggatgtggactttcggcgcggtgatgattgccattatcgccgtgctgttcatgatttttttccgcgaatccgacaacgaaattacggctatcaaggtcgatgatcgcgatattgcgttgacacaaggggaagttaaatgaaaacagaacgtattctcggtgctctttatgggcaggcgttaggggatgcgatggggatgccctccgagctttggccacgcagccgcgttaaagcacactttggctggattgaccgttttcttcctggaccaaaggagaataacgcggcctgttattttaaccgcgccgaattcaccgacgataccagcatggcgctgtgtctggcggatgcgttactggaacgtgaaggcaagatcgatccggatctgattgggcgtaatattctcgactgggcgctgcgtttcgacgcctttaacaaaaacgtactaggtccgaccagcaagattgcgcttaacgccattcgcgacggtaaacccgttgctgaactggaaaacaacggcgtgaccaacggcgcagcgatgcgcgtcagcccattaggttgtttgcttccggcgcgtgatgttgattcctttattgatgatgtagcgctggcgtccagcccgacccataaatccgatctggcggttgcaggcgcggtagtcatcgcatgggcgatttctcgtgccattgacggagaaagctggagtgcgattgttgattccctgcctagtattgcgcgacatgcacagcaaaaacgcatcactacgttcagcgccagtctggcggcgcggctggagattgcgctgaaaattgtgcgcaatgccgacggcaccgaatccgccagcgaacagctttaccaggtcgttggcgcaggtaccagcactattgagtccgttccgtgcgccattgcgctggttgaactggcacaaaccgacccgaatcgctgcgccgtcctgtgcgctaaccttggcggcgacacagacaccatcggtgctatggcgacggcaatttgcggcgcgttgcatggcgttaacgctatcgatcctgcgttaaaggcggaactggatgcggtaaatcagcttgatttcaaccgctatgccacagcgctggcgaaatatcgtcaacaacgggaggcggtatgagcggcgctcgattacacacgctgctgcctgaattaaccacgcgtcagagcgtgatggtcgtcggcgcggcggtcattgacgtgatcgccgacgcttatgccctcccctggcgtgggtgcgatatcgaactgaaacagcagagcgttaacgttggcggctgcgcactgaatattgccgtggcgttaaagcgcctcggcatcgaagcgggtaatgccttgccgctcggtcagggcgtgtgggcggagatgattcgcaaccggatggcaaaagagggcttaatcagcctgatcgataacgccgaaggtgataacggctggtgtctggcgctggttgagccggatggcgaacgcacttttatgagtttcagcggtgttgaaaatcagtggaatcgccagtggctggcgcgattaaccgttgcgcctggcagcctgctctatttttccggttatcaactggccagcccctgcggcgaattgttagtggaatggctggaagagctgcaagacgtgacgccgtttatcgattttggcccacgtattggcgatatcccggatgcattactggcgcggatcatggcctgtcgacctttagtgagcctcaatcgtcaagaggctgagattgccgccgaacgttttgctttatccgcagagataacaacacttggcaagcaatggcaggagaaatttgccgcgccgttgatcgttcgtctcgataaagaaggcgcatggtatttcagcaacgacgcttctggctgcattccggcatttccaacgcaagttgtcgacaccattggggcgggcgacagtcatgccggtggcgtacttgccgggctggcctctggtctgccactggcggatgccgtattactgggcaatgcagtggcgagctgggttgtcgggcatcggggcggtgattgtgcgccaacgcgcgaggaactactcctcgcacacaaaaacgtataattactcctcgcacacaaaaacgtatagatcgctgcgacagtggctaatgctgtactcaataggccgttgctgttggtcaagcgccacttgcttgatcaccagcaccggtattttgctatctaactgaatatgactctgaaactcggcatccggcatccgggcgctaacgcgggaacgcgtacgttgtgggtaaatgtgctggctgcggaaatagtcataaagactaatcccgatggcatcaacatcatgaattaaatgcgccggaacccagctttcctcaatgcttaccgcttcttcatcgacatagcgaatacgcttaagcaaaaagacatcacttcctgcttcgaccgccagctgctgcgcgacttcttcgggacatttcacgacacgcttgttaacccatagcgtatcgggctttttcccgcgcaataccacctgctgagaaaaacctcgcgcttctttcaagctgtattcgaagatgttgttgatctgcgtgccgtaaccgcggctacgcgtcaccacaccctcttcttccagcgcctgcatcgccttgcgcaccgtaatgcggctaacgccggttaactgacttaaatcacgttcaccgggcaaaatattgccatgctccagcaccccgctgcgcacggcattttttaccgtttcggcaaacttaatataaagcggcgtgttatccgccgctaaaatacgctcgttcagttgggcaatcagctgggtatgcgcttgttccatttgtctttttcctgccggggagtctggtgggagtatatcactgcttcttatttaaggcgtttctttaatcccatcaacgaatgcctgcaactcctccaccgtgccattaaatacattaaaatccaccggaccattgatgccatctacctgtccacggtcggaatgctgccagaagcgccaggccattccgtcattgtccggacgacgttgatagtagtgagccacccaccacggatattcattgaaatagcccgccagattggtgtgataaaaaacggctccactgtaaataatcggctttttccccgtacttttttcgaccatttttagccactgacttacccgcttgcgtaattcttttgcgcttaattttccccgttcttctacgtccagcacggcagggaaatcgccttgactgaaatccaccgtttgcagaaataatctcgcctgaacactagcggatacgctcggggagaaataatgatacgccccacgcagcaggccattttcgcggcttagttgccagttacggctaaaataggggtccaccagcttttcgccttccgtcgccttaataaaagcaaactgtaagcggataccattgtcgcgcatttttgccacccgctgccagtcgatccgctcctgccagcggctaacatctattccgtgaatggtgtaactggcaggaatgcgaatagcgaaagatttaaccgggcgataaccgtagaagtggatgtagtctgtaatctgaactgctgtgctatagaaaaaattcaccgtctgacgcggataaattgcaacgatggaaattagcccaagagcgcataatagagaggtgagtttttttcgactggtaattcttagctgcattggtttcatccctgaatgtcagtgccaaaggctgacaataaccaaagcagctatagtacggtgctcaccaccaggcgtggaagtggtgaaccggaccaataccgtgaccaacttccagcgtgtcggcctgggctaacgcgctactaagccagctttttgcctcctgtacggtgtcagcccagtttgtatggcgcgggcgtagtgcagccaacgccgcagagagtgtacaaccagtgccgtgggtgtttttggtcataatgcgcggtgcggtaaaccgttgttcaccctcgcgggtaaacagccagtccgggctttgctcatcatccagatgaccacctttcattagcactgcgccacagcccatcgccaacaggcttcgcccttgttccagcatttcctgttcggtgcgcgcgtgtggcgcgtcgagcaaggcggcagcttcgggcaagtttggcgttattaaactaacctgtggcaataatcgactgcgcagcgtagcaaccgcgctaggactaagcagcgggtcgccgctttttgccagcataacggtgtcgagtaccacgttttggatctgataacgttgcaaccgttctgccaccgcttcaacaatatcggtttccgccagcataccgattttagtggtatcgattcgcacatcgctgaacacgctatcgagctgggcggcgacaaaatcaggctcaatgcgatacacgctctgtacgccacgggtattttgcgccaccagtgcagtaataacactgcaaccataagcgccaagtgcgctgaaggttttaagatcggcctgaatccccgcaccaccactcggatcagtaccggcaatcgtcagagcgttaattcgtttcatgcctgcacctcctgcgtcaattgccagagcgcatcaaggaaatgtggaacaaaactgcctggcccctcgcttctggcgactgcgcgttctccggcttgtttcatccagtgacaggcagatgcgacattttccagcgtatcgcctggtaacgcacagcaggcagcgacaaccgcgcttaatgcacagccagttcctaccactttggtcattaacggatcaccaccgtgaataccaatgatacgatgtccatcggtaacataatccatctcgccagtgaccacgacgattgcgccagtttcccgtgccagtgtttgtgcagcgggtatcgcgttagctgcggcgtcagtggtatccactccccgtccgccattagcaatgccagctaatgccatgatttcgctagcattaccacgtatcgctgccggtttaaaagataaaagttcatgacaaaaatggcggcgataatcgagcgcacccaccgctactggatcaagcgtccagggtgtttgagagctttttgcttgctcaacggcagcacgcatcgcctgagcgcgtggctgcgtcagtgtgccaacgttaatcaacaaggcactggcgatagccgcaaactgactggcctcttcggtttcgataaccatcgctgggcttgcaccgagcgccagcaaggtattggcggtaaaggtttgcaccacatcattggtcatgcagtgcacaagaggggaatgttggtgaaaaaggtgtaacgcgtgcgcagattgcgcactacccagcaggtcgacttgcatagtttgctcctgccataacgtgaagaagcaatgacctggtggtccgtgacttccctacgctggcattatccagatcaggtgatacgggtatttctcagccttcacgcagaagggcaccccgagtcgtttggttgcgatgataaatcgcagaggaggatggtaatgtccagcgcacgcgttgtaaacgaggaaaaacggcagttttacaatcgcgttaataaattatttgatataactatccagcaccttcagaacgacatccagatcttcttcacgttttagctcatccccctggtgaacgatgtgttccgtcagatgacctttaatcacttcccgcatcagaccgtttaccgcgccacggatagcagcaatctgttgtaaaactgcagcgcattcgtgcggctcgtcgagcattttcttgagcgccacgacctggccctgaatcttactggcacgcgctttcagtttctgtttatcacggattgtatgagacatggcaacacctggttaacaagaatatgaaaaatcatagcactattaatctactggggggtagtatcaggtactgggggggagtagaatcagattgccgaattaatactaagaattattatcatgaccgaatttacaactcttcttcagcaaggaaacgcctggttcttcatccccagcgccatcttacttggtgcgcttcatggcctggaaccagggcacagtaaaacgatgatggcggcgtttatcatcgccatcaaaggcaccattaaacaagcggtgatgctcggactggcagcaactattagccataccgcagtggtctggttaattgcctttggcgggatggtgatcagcaagcgctttactgctcaaagtgcagaaccgtggctccagctgatttccgcagtgatcattattagcaccgcgttctggatgttctggcgtacctggcgcggcgaacgcaactggctggagaatatgcacgggcatgattatgagcatcatcatcacgatcacgaacatcaccacgaccatggacatcatcaccatcacgaacatggcgagtatcaggatgcccatgcacgagcccatgccaatgacattaaacgacgctttgatggtagagaggtcaccaactggcaaattttgttatttggcttaaccggtggccttatcccctgcccggcagcaattaccgtgctgttgatatgcattcagttgaaagccctgacactgggcgcaacactggtcgtcagtttcagcattggcctggcgttaacgcttgtcaccgtaggcgttggcgcagcaatcagcgttcagcaggtcgcaaaacgctggagcggatttaacactctcgctaaacgcgccccctatttttccagtctgttgattggcttagtcggtgtgtatatgggcgtacatggcttcatgggcataatgcgataactcaatcctttaggcttgcatgttatcttcagcccaggatgattcttaaatcagctatttccgctgactctctgctcgctaaggatgcttttagggcatcctttcatttacactttttacgaaatcatgggatcactaacaaaatatcgcttgtcagttatattgtatggcaggaaagatatgcgactgatattacagatccccaaagtggagagtttatgaccattaaaaataagatgttgctgggtgcgcttttgctggttaccagtgccgcctgggccgcaccagccaccgcgggtagcaccaataccagcggaatttctaagtatgagttaagtagtttcattgctgactttaagcatttcaaaccaggggacaccgtaccagaaatgtaccgtaccgatgagtacaacattaagcagtggcagttgcgtaacctgcccgcgcctgatgccgggacgcactggacctatatgggtggcgcgtacgtgttgatcagcgacaccgacggtaaaatcattaaagcctacgacggtgagattttttatcatcgctaaaaaaagccccctcatcatgagggggaaatgcagacaccttgttattttttattattagccacttgctcgtcttgcttgttattagtcgtatttcacgttgattaatgcggttgcctccagtgcgccagatttaactttgtttgtatcgtagacgtagtaactggctgttatcggaatactaaccgttgtatctgtaagtttactcttcgccgcaacttcctttaaatttgtatatcctttactgctgttagtgatatttaaaagtgtgactgggctaccattactttcaagaataaatcctacgccattatcttccgcacctttcagtattgtgttgctgttggttaacaagtcagaactacttaaatacacctgcattttccgacttgtttgattttgttgacctaataaatttttacaacgcagaataatatccccttgtttactatttattgttgctttgttacctgtggctggtaattgactaacgggaatactgtctaaagtaattaataaatcgtccggtttgcaggttgtggttatcgggttgtaactcaatgtcagattaaaggaatagacacctgcattttgtgccaatgcatttctgtagctatttacacatgcatcccaactcttgccacctaataaacacagtagaaattgtactgcggcactcccgcgtgtgctactactagcactggataatgtcgcaacaccattaatcatcacactaccgccgccccccgcagaaacattcacttttgcattactggccgcaggtgtcaccgtaacactataaccactggtgaaactggtctgattattactcaacgtgatgttgtttttattggtccattcaaaatgtaaatttaattttatggtatcgttataaagtccaacaataatatcgctcgggctcataggggtgatagtatttgtacttacgcaactgctatcattaaaattatgctcatatgtcgccatttgtgtttgagtaagtgcaaaatccccctgaacaaccaagttgtgctgaacagataactcactataacatgccgcatagctcacaggcataaccatcatcattaatataaatagcattatgcgaatttccatagaaccacctgactattactggcaaatataatttctactttcatcaatctctttaccgaaggtgattgtgcaactaagtccttgttgcttatcaattgccacattaacgcttggcggtacttcattggtgcgaataaataactgacttccctggccgacaacgccaatattatgaccatggatatcattgacttcataaccaaacgttaaactttgcccatctgctcttaacgcttttataaaccatggcttgcgctgatcggtatcaaaattaaccagtacaaccgcgccgcgataaggggcggcaattttccggttgccacgtaattctgcttcgctatcgctttggctcacatccagcatcaggtgattttcccgataaggtgtcattccgtcgtatatcaccactccattacggtttgttgtgcgatatttttgcccattgacataagcatctttaattcctggcgcattcatcacagcaaacgtttcggaaagacggttcgccagattaacgccaccgctccaggcgacaatgcccccactaacactggctccagcctgtcgataagtactgctctgactataactgccattcactgtcgcaaccggcgcgttccaggtcaaattcgccccagctgtcgtttcatttccctgatgttgatgactcaggttgacaccataattgaactgatcccgactccctactgttccacttaatcccgtattattactggcaaacccctgatcatcaaacgtcgtactgttagacatatatatttgccgacgaggcgtgctaacgtcatcaccccaatcaaagggaatgcttataaaaatattaaaacgtttctcttcatgatgattctcgtcataagcctggcttgccgcgagggtatagcttatccgtcgcaggttgttggaataactcaactgataatccttactactgccgctacgcccccagtaatctcgccataacgtacttaaactcacagacccccaaccttctggcaaactctggctcatattggcggaaaagctatttttgcggccaaaatcgttctggtaataatcggcaatgtcatagacatcgttttcatcacggcgataattatctttattgtttgcccaaacgtgatcgttaaatgtccggtaatcacggctgctataacgccaggccgccagaccaaaacgcgtgctcgtttggctcacaaatttgttgtaggcaatttgataactttgcccgtcaaacacatcgccgttgtcttgtttactatggctcttagtggcatcgacggaaatggcaccaatgcgtgtattccagccagcccccaaagtaaacgcgtaataattattcgcgaccatgctgccaccatacagcgtcaataaattattaaaaccatactgataacccgcctggacaaaatcactttgtttgctcgccccttcaatatggctacgacccgccgctaaatcatatttgctcacgccgggttgcagcatatttggcaccgctgcataaggcaccagataggtggttacgctgccgtccgcctctttcacgctgacatcaagatctgctccaccaccggccaactgcaaatctgtaatcgcgaacgggccaggaggaacctctttctgataaaccacaaaaccattctgttcaatagttaccagcgcgttactctgagcaatcccctgcacccgtggcgtaaaattttgtttgctgttaggcaacatctgcatatcacgaaacaaccgcacacctctgaagcgaacagaatcaaaaatatcgctacttgtgtacatatcacccacgcgaagcgtgccgagaagttgggcaaatccacgttccagatacagggtattgcttttccacacccctggattgttatttgttttactgaaactggcatcagaatgcagttgccaccccagtaaatttaacccgctgttaaaacgtacatatgtactcttgttattaccgctcgctttatagtcgctgtaatactgactcagataataagaggtataaaacgcattaataccccgctcccagttttccggtggaacatagccactttccagttcttccacccaggcctgcgggacactgaaatcgagacgaaaaaccccgatatcccaggtatagctcccaccctgaacaagttgctcaaatgttaaacattgcttaccgctggcgaagttatcgctattaatgcctaaccgcttgataacttctctacttaaacatgtttcttgcgggttgtctttaacaataatctcatatttcccgcgccattgcttattgacataaatatcgatgtcatactgccccggtaagggttgattatcatcaagacgaatatttgcaacctgctggtctttcattccacctatcataaaatgggtatcaaaggtttcttcagctgcataagcttcaatgccgagcaataacgctacgattgcacttgcaagtggggtcattctcaacataggcagctcctgcaattaaattttgtcactaatatagttgccatggtcatcgataatggtcagatgccagttatttgcattattacttttgacattaacactctgactttctaagggggcaatcataatagtttcataattgactttgacattattagctttgacatcgctaatcgtcacccaattagcactgtcattttttatcaccaaaccattgccactgcgatttaccagcaattttttaaatgtcgctttatttaccggagcaatacccgctggccggtaaaacaacttaattctgttttgcatcgcaaacttcagtgcattcttaccttcttgctctggactatttggtggaatatccagaacattcagataaaaaatgctttctttattagtgggcagtttattcggcataattttgatttttacttgctgcccggaatttgcccctatttttgccactggtggcgttaacatgaaaggaacctgaattttttctggtggtaaactcgtatcgccatcatcaatccacgcctgcagcaggctagaacggtttccctggttcatcaactgcaccatcacttctttattttctgccgggtaaataatgcgcgtcccgtagataacaattccggcatgtgcaggaaggaccatagaaaaaatgagtaaagataataatcctttcattttaatgcctcttaaattaaaaggccgccatgggatagcggccatgtttattacctggagaaacttacaattttatttattaatcctgcgccacacgcataaccagagaagataacacatcaccactttgcacactgttatctgtcagtttcaggtattttgctttaaacggaatagcatattgaccttccgctgttttataactctcaatgttaaaaggtgcagaaacatccaggacatcgctgttatcacctaaatagagatagtaacccacggtatcgttgctactggctatcgccttatcgttaccggttattttatcgttggtaatcaagctgagttttacaccagcaacttctttcgggcagctaatttttaacatgctgctggttacaccgactgcatcatcataggtagaatatttagctttaccttcaaagacactggttggtacagtcggcatattaatacttacactatcaccacccgcttcgaatttacacggagattctgcaatattccccttaatagttaatgttccggtatcaacgtctgcagcaaatactccagcgctcataaaaaaagaagaaaagacagcggcagcaataatactacgtttcataatatgttccttaataaaatttatttttggttgttaagagtctgtatctcttggaaacaaatttctcacatcaaaaaagttgccgcaatgtaaacacattgttttattgatttaaaacaaattaaccattgcaatataaatacaaaaaatatttaagagtattaactatttatcgcatctatcaattaatgtagatttatgtaaatggtattgttgatatcaataaaaaagccgaaatcatttatataaatgatttcggctttctaaatgcaattaaaatcaggttgccaaattaatcgtagcgatttaacacgattcgacgtttgctatcgctacctgcaacaaccacttctgtcgttacacctttgacggggctagaaaacagatgacgggtgtcaacattatacgttaactgaccacaatgctgttgaggttgaccattaaccatagccatactgcatgttgggggactgatcctgccattaatcgctaatgtggcagtctcactagagaatgcgggagaagccaatccataggcaagaaaaataattccactcagccaatacttattcattgaacgttatccctgtagtaaaggttatgcctggatagaatgagtgcataacaaactatagctgtacatccactacacagccacgaaggatgataatgaagcattgcctgtatgatcaatcgactttgtagagtttcggacgaaggtccgcagaatattcgcagtattaaataagtgttcattaatgcggcaaaaactaatacaccgcatcaatgtaacatctctgcggtgtatgaagaataaccagaatggttaataggcgttagaccgcgcggaaggaaatctcgcctggaatgacttcaccctgccagtagagctgagctgcaacgcggtcagccagctggcggtagatagcggtaaattcgctctccggacggctgataaccgttggcgtacctttatcgagatcctcacgtaaggagatgtgtaacggcatctgccccagcagctgtgtatggtatttttcagccagtttctctgcaccaccggtaccgaaaatcggttcatggtgaccacagttactgcaaatatgcacactcatgttctcgacaataccgagcaccggaacctcgactttctcgaacatcacaatgccttttttcgcatcgatcagcgcgatgtcctgcggggtggtgaccacgactgcaccggttactggaatgttttgcgccagcgtcaattgaatgtcaccggtgcctggcggcatatcaagcaccagatagtcgagatccggccacaaggtttcctgcaacatctgcattaacgccttgctcgccatcggtccacgccacaccatcgcattgtcgtcagtgaccagataaccaatactattggttgccaggccatgagacataatcggtgccatatgggtaccgtccgggctagttggacgctgattttctgcgcccaacattgttgggatacttgggccgtagatatcggcgtccagaatgccgactttcgccccttctgccgccagcgccagtgccaggtttaccgccgtggagcttttacccacgccgcctttaccggaactcaccgcgataatgttcttcacaccgttaattcccggctgattcttcacgcgtttcagagtggctatgttatggctcagtttccagtcgatagctttcgccccggtgatgcgcagcagttcggcgctacattgctcttttaactcttcgaacgcgctatgccagacaaacggcataaccagttccacatgcaacgtgtcgtccatccaggcgacatggtgcaacgctttcagcgtggtgaggttatgcttcagggttgggtgctgaaaattggccagtgtcccggcgaccattgcgcgcaaggcttctggacttttggcctgggattgttcgttcatcccgactccttttttgtatagataaaccatcagctgatagtttacctgaagaatatagagaagtacttacttaacattttcccatttggtactatctaaccccttttcactattaagaagtaatgcctactatgactcaagtcgcgaagaaaattctggtgacgtgcgcactgccgtacgctaacggcagtatccacctcggccatatgctggagcacatccaggctgatgtctgggtccgttaccagcgaatgcgcggccacgaggtcaacttcatctgcgccgacgatgcccacggtacaccgatcatgctgaaagctcagcagcttggtatcaccccggagcagatgattggcgaaatgagtcaggagcatcagactgatttcgcaggctttaacatcagctatgacaactatcacagcacgcacagcgaagagaaccgccagttgagtgaacttatctactctcgcctgaaagaaaacggttttattaaaaaccgcaccatctctcagctgtacgatccggaaaaaggcatgttcctgccggaccgttttgtgaaaggcacctgcccgaaatgtaaatccccggatcaatacggcgataactgcgaagtctgcggcgcgacctacagcccgactgaactgatcgagccgaaaagcgtggtttctggcgctacgccggtaatgcgtgattctgaacacttcttctttgatctgccctctttcagcgaaatgttgcaggcatggacccgcagcggtgcgttgcaggagcaggtggcaaataaaatgcaggagtggtttgaatctggcctgcaacagtgggatatctcccgcgacgccccttacttcggttttgaaattccgaacgcgccgggcaaatatttctacgtctggctggacgcaccgattggctacatgggttctttcaagaatctgtgcgacaagcgcggcgacagcgtaagcttcgatgaatactggaagaaagactccaccgccgagctgtaccacttcatcggtaaagatattgtttacttccacagcctgttctggcctgccatgctggaaggcagcaacttccgcaagccgtccaacctgtttgttcatggctatgtgacggtgaacggcgcaaagatgtccaagtctcgcggcacctttattaaagccagcacctggctgaatcattttgacgcagacagcctgcgttactactacactgcgaaactctctagccgcattgatgatatcgatctcaacctggaagatttcgttcagcgtgtgaatgccgatatcgttaacaaagtggttaacctggcctcccgtaatgcgggctttatcaacaagcgttttgacggcgtgctggcaagcgaactggctgacccgcagttgtacaaaaccttcactgatgccgctgaagtgattggtgaagcgtgggaaagccgtgaatttggtaaagccgtgcgcgaaatcatggcgctggctgatctggctaaccgctatgtcgatgaacaggctccgtgggtggtggcgaaacaggaaggccgcgatgccgacctgcaggcaatttgcagtatgggcatcaacctgttccgcgtgctgatgacttacctgaagccggtactgccgaaactgaccgagcgtgcagaagcattcctcaatacggaactgacctgggatggtatccagcaaccgctgctgggccacaaagtgaatccgttcaaggcgctgtataaccgcatcgatatgaggcaggttgaagcactggtggaagcctctaaagaagaagtaaaagccgctgccgcgccggtaactggcccgctggcagatgatccgattcaggaaaccatcacctttgacgacttcgctaaagttgacctgcgcgtggcgctgattgaaaacgcagagtttgttgaaggttctgacaaactgctgcgcctgacgctggatctcggcggtgaaaaacgcaatgtcttctccggtattcgttctgcttacccggatccgcaggcactgattggtcgtcacaccattatggtggctaacctggcaccacgtaaaatgcgcttcggtatctctgaaggcatggtgatggctgccggtcctggcgggaaagatattttcctgctaagcccggatgccggtgctaaaccgggtcatcaggtgaaataatcccccttcaaggcgctgcatcgacagcgccttttctttataaattcctaaagttgttttcttgcgattttgtctctctctaacccgcataaatactggtagcatctgcattcaactggataaaattacagggatgcagaatgagacactttatctatcaggacgaaaaatcacataaattcagggcagttgagcaacagggaaacgagttgcatatcagttggggaaaagttggcaccaaagggcaaagccagataaaaagtttttcagatgctgcggcagcggcaaaagcggagcttaagctgattgcggagaaggtgaagaaggggtatgtggagcaagcgaaggataattctttgcaaccttcccaaacggtaacgggctctctcaaggtagcggacttatccaccattattcaggaacaaccctctttcgtagcagaaacccgtgcgcctgacaaaaatacagatgctgttttaccgtggctggcgaaagatattgctgtcgtttttccgcccgaagttgtacacaccacgttaagtcatcgccgctttcccggagttcctgttcagcaagcagacaaattgccccaattacgtcgcttagcctgtagtgtgtcgcaacgggataataaaacagccacatttgacttcagcgcctgttctttagaatggcaaaacaccgtcgcccaggcgatcagtcagatcgacggcctgaaaacaacacagttaccatcaccagtaatggctgtactcacggcacttgaaatgaaatgcacaagatataaagtgcgtgaggatgttatggatcagatcgtccaggaaggcggtctggaatatgctactgatgtaataatacaccttcaacagattgatattgaatgggattatgcgaataatgtcattattattctgccgtctggcattgcacctagctacttggagcaatattccagatttgaatgacgcctacgtaaacatttatcactgacggaagagtctctctggcaaaaatgtgcacaaaaacttattgccgcaattccacatattccagaatggcggcaaccattaattgctttgttattacccgaaaaaccagaaattgcacatgaaattgcccagcgtctactggggcaaaaaaaattaccctcgcttgagtggttaaaaatagtggcgactgatgagcacattcttgcctcattagaaaaatatcacgaaccatatgccatttttgatgattactattgtggtgcgatatggtcagccaccgtattacaggagcaaggtgttgcagccctgccccgatttgctccctatgccgcaagtgactactgcgccgatgtgttgcgtcatatcaatcatccgttcgcattgacactgcttatacgtgtagccgggcaaactaaacgctgtcacgatcggatgacgaaagccattgctgcgttcccacatgcagcaatggcggcactgacggaacttcttgggcaaaaagaagagaacagttggcgcattatgctaatgacaatgcttatctcacaaccagcactggcagaacaggtcattccctggctctcgacacccgcagttgccgtactgaaatcatgccagcaacaactgacacagccctcaaaccatgccagcgccgatctactgccagccgtagtagtctcccctccctggctttcgaaaaagaaaaaatcgccgattccggtgctggatttagcgccattaggcattgagccaatctgttatctgacagaagaaatcagtaatcaacttttggcgaaatatatctggtattcaaaacacatcacggttagccatgaagaaagtactaccaacctgttggcaaggatgggttttcaacgacggatcgctggtacatatattaaagctcccgaagcggtagttgaggcatggctaaatgaagattattcaaccttactaagtgaatttaaggtgtttcattcacctaccgggcattattggcagttggggattttgacaacattgccgctggagaaagcagtaaaagcatggaatgcccttaccctatctccacataccgataccgaatactccatgttacattttggactcaaagggttacctgggttagtaaactcacttgcacgctatccacaagaagccttgcccatcacgaattacttcgcagcgagtgagctggctcctgccgtcgcccgtgccttcaacaaactgaaaacgctacgcgaaaacgcccgtagctggctgttgaaatacccggaacatgcccttaccggcctgctgcctgcggcgctcggcaaagccggtgaagcacaggataacgcccgcgctgccttgcgtatgcttaccgaaaacggtcatcagccattactgcaagaaatcgcccgacgttataaccagccggaagtaaccgatgcggtgaacgctctgcttgcgctcgatcccttagataatcacccgacaaaaatccccactcttccggccttttatcagccatcgctctggacgcgcccggtattaaaagcaaatgcccaatcactgccagatagcgccctcctccacctcggtgaaatgctccgcttccctcaggaagaggctctgtatccgggattattgcaggtgaaagacgtctgttccgccgactcactggcgggatttgcctgggatctgtttaccgcctggcagaccgctggcgcgccgtcgaaagagagttgggcgttcactgcgttaggcgttctcggtaacgatgacaccgcccgcaaactgacgccattaatacgcgcctggcctggtgaatcccagcataaacgcgccaccgttgggttggatattctcgctgctatcggtagtgatatcgcccttatgcagcttaacggcatcgcccagaaactgaaattcaaagcattacaggagcgggcaaaagaaaaaattgccgacattgccgagagccgcgaactcacggtggcggagcttgaagatcgggttagcaccggatctcggtctggatgataacggttcgctgctgctggattttggcccacggcagttcaccgtcagctttgatgaaaccttaaaaccgtttgtgcgtgatgtttccggcagccgcctgaaagacctgcccaaaccgaacaaaagcgatgatgaaacgcgggcgaacgatgcggttaaccgctacaaattgctgaaaaaagatgcgcgtaccatcgccgcccagcaggtagcaaggctggaatccgccatgtgcctgcgccgccgctggtcgctggaaaacttccagctcttcctggttgagcatccgctggttcgtcacttaacccgccgtctgatttggggcgtttatagcgccgaaaaccagctactggcttgctttcgcgtagcagaagataacagctccagcaccgctgacgatgatcttttcaccctgccggaaggcgatatctctatcggcactcctcacgttctggaaatatcaccaacggatgctgccgcctttggtcagctttttgccgactacgaactgctaccaccgttccgccagctcgaccgtaacagctacgccctgacagaagccgagcgcaatgccagtgaactgacccgctgggcaggcagaaaatgcccgagtggtcgggtcatggggctggcgaataaaggctggataaagggcgaaccacaggatggaggctggatcggatggatgatcaaacctttgggtcgctggtcgttaatcatggaaatcgatgaaggctttgcggtaggcatgtcgccagccgaactcagcgctgagcagctcttaagcaagctgtggctatgggaaggcaaagcagaaagatatggctgggggagtaattcaacacaggaagcgcagttctccgtaatcgatgccatcaccgccagcgagctaattaacgatattgaagccctgtttgaataaggaaagagcatggacaaggaattaccgtggctggcggataacgcccaactggaactgaaatataaaaaaggcaaaacgccgctcagtcatcgtcgctggccgggcgaaccagtgtccgttatcactggaagtctcatccagacattgggtgatgaattgctacaaaaagctgagaagaaaaaaaacattgtctggcgttatgagaattttagtctggagtggcagtccgccatcacgcaggccatcaacttgatcggcgaacacaaacccagtatcccggcccggacaatggcggcgctagcctgtatcgcgcaaaatgacagccaacagttgctcgacgaaatcgtccaacaagaggggctggaatatgcgactgaggtggtgattgcacgccagtttattgcgcggtgttatgagagtgatcctctggtagtgacattgcagtatcaggacgaggattatggctatggttatcgcagtgaaacctataacgaattcgatctccgactgcgtaagcatctctctctggcagaggaaagctgctggcagcgttgcgccgacaaactcattgccgcactaccaggaataaacaaagttcgccgcccttttattgcgctgatcctcccggaaaaaccagaaatagccaatgagttggtaggccttgaatgcccgcgaactcattttcattctaaggagtggttaaaagttgttgctaatgaccccacagcggtgagaaaactcgaacactactggagccaggatatatttagcgatcgagaagccagctacatgagccatgaaaaccacttcggctacgcggcctgcgccgcccttttgcgcgaacaaggactggcagccattccgcgcctcgcgatgtatgcccataaagaagattgcggcagtctgctggtacaaattaaccatccgcaagtcatccgcaccttgctactggtggctgataaaaacaaacccagcctgcaacgtgtagctaaataccataaaaacttcccccatgcgacgctcgccgcactggcagaactgctggcgttaacagaaccaccagcccgccctggttatccaatcatcgaagacaaaaagctgcctgcacagcaaaaagcacgcgatgaatactggcgtacgctgttacaaacgctgatggcaagccagccacaactggcagcagaagtgatgccgtggttaagtactcaaccccagagtgtgctgaagagttatttaagcgcaccgcccaaaccggttattgatggcaccgataacagcaatctgccagaaatcctcgttagtccaccgtggcgtagtaagaaaaaaatgacagctccacgtcttgatttggcaccgctcgaattaactccgcaagtttactggcaaccaggcgaacaagagaggcttgccgccactgagcctgcccgttatttcagcacggaatctcttgcgcaacgcatggaacaaaaaagtggacgagttgtattacaggaactgggttttggggatgatgtatggctgtttctgaattatatactccccggaaaactggatgctgcacgcaatagtctctttgttcagtggcattactaccaggggcgggttgaagagatcctgaatggctggaactccccggaagcacaattagcagaacaggcgctccgcagcggtcacatagaagcgttaattaacatatgggaaaatgacaactacagtcattatcgtccggaaaagagtgtctggaacctgtatttattggcacagttgccgcgtgagatggctttgaccttctggctgcgtatcaatgagaaaaagcatctgttcgcgggtgaggactattttctcagtatcctcggattggatgcgctaccaggtctgctgttggcttttagtcatcgtccaaaagaaacatttccgttaattttaaattttggcgcaacagaactggcgctgcctgttgcccacgtctggcgacgtttcgcggcgcagcgtgatctggctcgccagtggattttacaatggccggaacatacggctagtgcacttatccctcttgtctttaccaaacccagcgataatagcgaagccgcattacttgccctgcgtttactgtacgaacagggacatggcgaattgctacaaaccgtggcaaaccgctggcagcgtacagatgtatggtctgccctggagcagttgcttaaacagggtccaatggacatttacccggcacgcattccaaaagcccctgatttctggcatccgcaaatgtggtccaggccgcgccttatcactaataatcaaactgttaccaatgacgctctggaaattatcggcgaaatgctgcgctttacccaggggggacgtttttatagcgggctggaacaactgaaaacgttctgccagccacaaacgctggcagcttttgcctgggatctcttcactgcgtggcaacaagctggtgcccccgcaaaagacaactgggcatttctggcgttaagtctctttggtgacgaaagcacggcacgggatctgacgacacagatcctcgcctggccacaagaaggcaaatctgcccgtgctgtcagcggcctgaacatccttaccctgatgaataatgatatggcgctgatacagctgcatcatataagccaacgggctaaatcccgccccttacgtgataacgcggcggaatttcttcaggtggtcgcagaaaatcgcgggctaagccaggaagagctagcggacagattagtcccaaccctgggccttgatgatccgcaggcgttgagttttgattttggtccccggcagtttaccgttcgcttcgatgaaaatctcaacccggttatctttgatcagcaaaacgttcgccagaaaagcgttccccgtttgcgcgccgatgacgatcaactgaaagcgcccgaggcactggcccgactaaaagggctaaaaaaagatgctactcaggtgagcaaaaacctgctcccgcgtcttgaaacggccctacgtaccacccgacgctggagcctggcagattttcattctctgtttgttaatcatccctttacccgtctggttacccagcgattaatatggggggtttatccggcaaatgaaccgcgttgtttactcaaagcctttcgtgtggccgcagagggggagttctgcaatgcgcaagatgagccaattgacctgcctgcggacgctctgattggcattgcccacccgttagaaatgacagcagaaatgcgcagtgaatttgcacagctttttgccgattacgaaattatgccgccttttcgccagttgagccgccgcacggtgctgctcacacctgacgagagtaccagtaacagcctgactcgctgggaaggtaaatccgctaccgttgggcaacttatgggaatgcgatacaaaggctgggagagtggctatgaggacgcatttgtctataacctgggtgagtaccggctggtccttaagtttagtcccggttttaaccactacaatgttgatagcaaagcgctaatgagcttccgttctcttcgagtgtaccgtgacaataaatccgtcacttttgccgaacttgatgtgtttgatttgagtgaggcgttaagcgcacctgacgtcattttccattaaaacacagcgggcagtgatgcaactgcccgttatcaacacgacttaccagcggggaaagcgatgatcgtgcaaaaagagctggttgctatttacgattatgaggtccctgtacctgaagatccgttttccttcagacttgagatccataaatgctctgaattatttacaggttccgtctatcgactggagcgattccggctacgtccaacatttcatcaacgtgatcgagaagatgctgacccgctaataaatgatgcgttgatttatataagagatgagtgtattgatgagcggaaattacgaggtgaaagtcctgaaactgtaatagcaatttttaatcgtgaactacagaatatattcaaccaagaaatagaataatatactctaaataattcaaattggtccgatccggcgcaacgtcccaatggcctggattataaatctcattatcttaattgcaacggggtccagccgtggttataattcgttcgttggaacacgatgttgcacaggctgtggtgttaggcctgaaaatagtaaataaaagaacctgcctcaccagcaggtttttttatttactgtgatctgctttccagatatttttcgctcaaacaactaatgcgccaaacatttattgcgcgtaaaatatcgtttatttcattaatacatttcagggatgaatatatgagtccgcagaataatcatctgcagcgtccgcctgctgctgtgttatacgccgatgaactggcaaaattaaaacaaaatgataacgcaccttgcccgcccggttggcagttaagtttgcctgcggcccgtgcttttatccttggcgacgaagcgcaaaatatcagccgtaaagtggtgattagcccctccgctgtcgaacgtatgttagtcactcttgctaccggccgcggtttgatgttggtgggggaaccgggtaccgcaaaatctcttctttctgaattactggcaaccgctattagcggcgatgccgggttaaccatccagggcggggcatctaccaccgaagatcaaatcaagtatggctggaactacgccctgcttatcaatcatggtccgagtacggaagcgctggtccctgccccgctttatcagggaatgcgcgacggcaaaatcgtccgtttcgaagagataacgcgtacaccgctggaagtgcaggactgtctgttaggtatgctttctgacagggtgatgacggggccggaactcactggtgaagccagtcagctctatgcgcgagaaggctttaatattattgccactgccaatacccgcgatcgcggcgtcaatgaaatgagtgctgcgctaaagcgtcgcttcgattttgaaacggtttttccgattatggatttcgcccaggagttggaactggtcgccagtgctagcgcgcgtttgctggcccatagcggtattccgcataaagtgcctgacgcggtactggaattactggtccgcaccttccgcgatctgcgtgccaacggcgaaaagaaaacgagtatggatacactgacagcgattatgtccaccgctgaagccgtgaacgtggcccatgctgtgggcgtccgcgcctggtttttagcgaatcgcgcgggggagcctgccgacctggtggaatgtattgccggaaccatcgtcaaagataacgaagaagatcgcgcgcgtctgcgccgttacttcgaacagcgtgtcgccacacataaagaagctcactggcaggcttattatcaagcccgccaccgcctgccgtgaggaaagatgcatgagcgagccgttaattgtcggcatccggcatcatagtccggcctgcgcccggctggtgaaaagcttaatcgaaagccagcggccacgatacgtgttgattgaaggcccggctgattttaatgaccgggtagacgaactgtttttagcccaccagcttccggtagctatttacagttattgccagtatcaggacggtgcagcccccgggcgtggtgcctggacgccatttgctgaatttagcccggagtggcaggcgctacaagccgcacgtcgcattcaggcacaaacttacttcatcgatttgccttgctgggcgcagagtgaagaagaggacgatagccctgatacgcaagatgaaagccaggccttactgctgcgtgccacccgcatggataacagcgataccctgtgggatcacttgttcgaagatgaaagccagcaaactgcattaccctctgcgctggcgcactattttgcccaactgcggggcgacgcctccggcgatgcgctcaatcgtcagcgcgaagcctttatggcccgctggattggatgggcgatgcagcaaaataatggcgacgtgttagttgtctgcggtggctggcacgctccggcactggcaaagatgtggcgcgaatgccctcagaaaattaacaagccagaattgcccagcctggcagatgccgttacaggttgttatctcacaccctacagtgaaaagcgccttgatgtgctggcaggataccttagtggaatgcctgccccggtatggcaaaactggtgctggcagtggggcttgcagaaggccggtgaacaactgctaaaaactatccttacccgtttgcgccagcacaaattgcccgcttctaccgcggatatggctgccgctcatctgcatgcgatggcgctggcacagttgcgcggtcatacactaccgttacgcactgactggctggatgccatagcaggcagcctgattaaagaagccctgaacgcgccgttgccgtggagctatcgcggcgttattcatcccgataccgatccgattctgctaacgttgatagacacattagcgggtgacggattcggtaaacttgccccttctacgccacaaccgcctctgccaaaagatgtcacctgcgaactggaacgtaccgcaatctcccttccggcggagcttaccttaaatcgctttacccccgatgggctggcgcaaagtcaggtgttacatcggctggcaatactggagatccctgggattgtacgccagcagggaagtacactgacacttgcaggcaacggtgaagaacgctggaaattaacccgcccgcttagccagcatgcggcattgattgaggccgcctgttttggtgccacactccaggaagccgcacgcaataaattagaagccgatatgctggacgcgggcggaatcggcagtatcaccacatgtcttagccaggcggcgttagcgggtctggcgtccttcagtcaacaattactggagcaactcacactattaatcgcccaggaaaatcaatttgccgaaatgggccaggcgctggaagtgctttatgccttatggcggctggatgaaattagcggtatgcaaggcgcgcagatattacaaacgacgttatgcgcgactatcgatcgcacgctgtggctgtgtgaatctaacggcagaccggatgaaaaggagtttcacgctcacctgcatagctggcaagcgctttgccatattctgcgcgatctacatagcggcgttaatttacccggcgtttctctttctgcggcggtagccttactggagcgacgcagtcaggcaattcatgccccggcgctggatcgcggcgcggctcttggcgcactaatgcgtctggaacatcccaacgccagtgccgaagcggcgctgacgatgctggcgcagttatccccggcacaatctggtgaggcgctgcacggtttgctggcgctggcccgccatcaactggcctgtcagccggcatttatcgccggtttcagcagtcatttaaatcaactgagtgaagccgattttattaacgccctgcccgatttacgcgcggcgatggcctggctaccaccacgagaacgcgggacgctggcgcatcaggtgcttgagcattatcaactggcgcaacttcccgttagcgcgctgcaaatgccgttgcattgtccaccacaggccattgcacatcatcaacaactcgaacagcaggcactggcaagcctgcaaaactggggagttttccatgtctgaactgaacgatcttctgaccacccgtgagctacaacgctggcgattaattcttggcgaagcggcagaaacgacgctttgtgggctggatgacaacgcccggcagatagaccacgcgctggagtggctgtatgggcgcgatcctgaacggctccagcgtggtgaacgttccggtggattaggtggcagtaatctcaccacccctgagtggatcaacagtattcacacgctgtttccgcagcaggtgattgagcggctggaaagcgatgccgtgctgcgctacggcattgaagatgtggtgacgaatctcgacgtgctggaacgtatgcagccttctgaaagcctgctacgcgctgttttgcacaccaaacatctgatgaaccccgaagtactggctgccgcccgccggatagtgtgccaggttgttgaagaaattatggctcgactggcaaaggaagttcgtcaggctttttctggtgtccgcgatcgccgtcgccgtagttttattccactggcgcgaaactttgatttcaaaagtactctgcgcgccaacctgcaacactggcacccgcaacacggcaagttgtatatcgaatccccccgctttaacagccgcattaaacgccaaagcgaacaatggcaactggtcttactggttgatcaaagcggaagcatggtcgatagcgtgatccactctgcggtgatggcggcctgtttgtggcagttacccggcattcgtacccatctggtggcgtttgacacaagcgtcgttgatctcacggcagacgttgccgatccggtagagttattaatgaaagtacagttgggcggcgggaccaatatcgccagtgccgtggagtatggtcggcaacttattgaacaaccagcgaaaagcgtcattatcctcgtgagcgatttttacgaagggggtagtagtagtttactgacgcatcaggtgaaaaagtgtgtccagagcggcatcaaagtgctgggactggcagcgctcgatagcaccgcaacaccttgctatgaccgcgatacggcccaggcgctggttaatgtcggcgcacaaatagccgccatgacgccgggcgagctggcaagttggcttgcggagaatcttcagagttgacataacttgcggagaatcttcagtcatgaatagtctacgtccggaattattagaactgacaccgcaggccctgacggcgttaagcaatgccggttttgttaagcgcagtcttaaggaactggaaaatggcaacgtcccggagatcagccatgagaacgacgctttaatcgccaccttcagtgacggtgtccgtacccagctggcgaacggccaggcactgaaagaggctcagtgcagttgcggggccaacggtatgtgccgtcatcgcgtgatgctggtgttaagttatcaacgactttgtgccaccactcagtctacggaaaaagaagaagagtgggatccggcaatctggctggaagaactggctacccttcccgatgctacccgcaaacgcgcacaggcgctggtcgctaaaggcatcaccattgagttgttctgtgcgccgggtgaaattccctctgcccgcttaccgatgagcgatgtgcgtttttattcccgcagcagtattcgtttcgcccgttgtgattgtattgaaggcacactttgcgaacatgtcgtactggcggtacaggccttcgtcgaggccaaagcgcagcaagcagaatttaaccatttaatctggcagatgcgcagcgaacacgtcacaagttctgacgatccgtttgccagcgaagaaggcaacgcgtgtcgtcaatatgttcagcaattaagccagacattatggcttggcggcatcagccagccgctcatccattacgaggcagcattcaaccgcgcattgcaggcggcagagacctgcaactggcgctgggtgagtgaaagcctacggcaactgcgcgccagcgttgatgccttccacgcccgcgccagccactataatgccggagaatgcttacatcagcttgcggcattaaacagtcgattaaattgcgcacaagagatggcccggcgcgacagtattggtgaagttcctcctgtgccgtggcgcacggtcgttggctctggcattgccggagaagcaaagcttgatcatctgcggctggtgtctttaggtatgcgttgctggcaggatattgagcattatggtttacgcatctggtttaccgatcccgacaccggcagtattttgcaccttagccgcagttggccgcgaagtgaacaggaaaacagtccggcagctacgcgtcggctgtttagttttcaggctggcgcactggcgggcgggcaaattgttagtcaagcagcaaaacgcagtgccgatggcgagctgctgttagctacccgcaaccgcttaagcagcgttgtgccgctgagccctgatgcctggcaaatgttgagcgcgccgttacgccagccgggcattgtggctttgcgggaatatttacgccagcgtccccccgcctgcatacggcctcttaatcaggtcgataacttatttattctgccggtcgctgagtgtattagcctcggttgggacagcagccgccagacgctggatgcgcaggtcattagcggcgaaggggaagataatgtgctgacgttaagtttaccagccagtgccagcgcaccttatgccgttgaacgcatggcggcgcttttgcaacaaacagacgaccccgtgtgtctggtttctggctttgtcagttttgttgaagggcaattgacactggaaccacgggtgatgatgacaaaaacccgtgcctgggcgctggacgcagaaactacgcctgtggcaccgctaccttctgccagcgttttgcctgtgccgtctactgctcatcagttgctgatacgctgccaggcgttacttattcaactgctccataacggctggcgctatcaggaacagagtgctattggtcaggcataattgctggcgaatgacctcaccgcggtgggtttttatcggctggcacatgtgttgggacaatttcgtaatacagaaagcgaggcacgggtagaagcaatgaataacggtgttttgctttgcgaacaattattccccatgcttcagcaacaaggatgaaatagtgctttttactaagagttctactccagttccggactgctcacgccacggtattaggcatatcctatatagcccctggtgagagtcaccagttccttgattaaataaaatggagttttacatgaaggctttcaataagctgttttccctcgttgttgcatctgttctggttttctctcttgctggctgcggtgacaaagaagaaagcaagaaattcagcgccaatctgaacggcactgaaattgccattacctatgtctacaaaggtgacaaggtgcttaagcaatcttctgaaaccaaaattcaatttgcctccattggtgcaaccaccaaagaagatgctgccaagacacttgagccgttaagcgccaaatacaaaaacatcgcgggtgttgaagaaaaattaacctataccgatacctacgcgcaggaaaacgtgactatcgatatggaaaaagtggattttaaagccctgcagggtattagtggaatcaacgtttctgctgaagatgccaaaaaaggtatcactatggcgcaaatggaactggtgatgaaagccgctggttttaaagaagtgaaataatcggttggcggtcatgctctaaacatgaccgccaattttttagccttttttcacatgctggcgcgctgccagtccacgcagaaaataacgtaaaaattgatcgccgcattcgcggaagtttttatgatccggtgcgcgcatcatcgctgtaatttccggcatgctaacgcggaactgctgttcggtgaggatagccagaatgtcatcggttttcaggctaaacgcgatgcgtaattttttcagcacgatgttgttattaatgcgacgttccggctccagtgccggagcagactcatccttgccgcgtttttcataaatcaggccattgaggaaactgctcaaaacaatgtccggacaacgctgaaaaccctcttcgtcttctttacgtagccagacggcgatctgttccgcggtggcttcgacattacccagcgccagaatacgcaccaggtcattattattggctttcaaaatgtagcgcacgctgcgcagaatatcgttacttagcatgaggccttcaggtgttgatgaggcaaaaagccattttagcagtcttttacaggccaatcgcctcttttaagcttttcagataacggcggctgaccggcacggttaagccattacgcaaaatcaactcggcctggccgttatcttccagacgaatctcctgtaaatgcgcgaggttaaccagatactgacgatggcagcgcagtagtggtgtacgactttccagggtacgtaatgtcaattcggtaaagccctctttcccttcgtggctggtaacgtagacaccgctcatccgactgctgacaaatgccacatctttcatttgcagcaaataaatccgactatgccccgtacaagggataaatttcagcgcctgttgattttccggtaacaggctaacatcctgcttgctgcgctcctgacgcaatcgcgccagcgttttctccagtcgcgcttcatcaattggcttcagcagataatcaaaggcatgttcttcaaaggctttaattgcgtattcgtcaaacgcagtgagaaaaacaatatacgggcgatgttccgggtcaagcatccccaccatttccagaccactgatgcgcggcatctggatatcgagaaacagcacatccgggcgcagtttatgcaccgcgccgatcccttccacggcgttactacactctccaacgatttcaatatcgctctgctcctgcaaaaatacacgcaggttctcccgtgctaacggttcatcatcgacaattaagactttaatcatgcctcgtccctccatggtagtcgtaacgttattcgggtgtaactatcaggctcacaggcgacgcttattccatagtcatcgccaaaccgttcacgtaaacgcttatccaccagattcatccccagcccactggcattggttaccggttgatacaaaccggcattgtcttcgatctccagcatcaaatgttgcccctcacgtcgggcgctgattgccactcgccctgtatccagcagttgacttgtcccatgtttaatggcgttttccactatcggttgcagggtaaacgcgggcaattgctgctgggataattcttgcggaatagcaatgttgacctgcaaccggctctggaagcgcgccttttcaatttgcagataagcattcacatgttcaatttcgtcggcgagagtaacaaactcgctaggccgctttaagtttttgcggaaaaaagtggaaagatactgcaccagctggctggcctgttcgctgtcgcggcggatcaccgctttaatggtgttaagcgcattaaacaaaaaatggggattcacctgggcgtgaagcagtttgatctcactctgggtgagcatcgctttttgccgctcatattgcccggcaaggatctgcgcgctaagcaattgcgcaatcccctcacccaacgtgcggttgatgctactgaataaacggtttttggcttcatacaatttgatggtgcccatcacccgctgattttcaccacgcaacggaattaccagcgtgctccccagtttgcattgcggatgcaaagagcaacggtaaggtacttcgttgccatcagcgtagaccacttcaccggtttcaatcgcttttaaagtataagtactagaaatcggtttgccgggtaaatggtggtcgtcaccaattccggtaaaggccagcaatttctctcgatcggtaatcgcgactgcaccaatatccagttcctgatacagcacctgagccactttcatgctgttcacttcgttaaacccctggcgcaaaatgccttccgtgctggctgccactttcagcgcagtggcagaaaaagcgctagtgtatttttcaaacatcgcgcgtttatcgagcaatatacgcataaacagcgccgcgccgacggtattggtgaccatcattggcgcagcaatattactcaccagacgcaccgcatcttcataaggtcgggcgatcgcaaggatgatcagcatttgcaccatttcagcgacgaacgtgacggcaccggcggtaatggggttaaagactttatcagtgcgcccgcggcggatcaggatgctgtgtaccaggccaccgagtaatccttcaacgatggtgctgatcatgcaacttaacgcggtcatgccccccatgctatatcgatgtaagccgccggtcagcccaaccagcccaccgacgaccggaccgccgagtaagccgcccattaccgcgcctatcgcacgggtattggcaatagaatcgtcaatgtgcaacccaaaccaggtgcccatgatgcagaagatggaaaagacgatgtagcagagaaatttatgcggcagacgaaccgtgacctgcattaacggtatgaataatggcgttttactcattaaccatgcaatgactaaaaaaacgcacatctgctgaagcagcagcaacaccagattaaaatcgtacatacccgcaaaccacacttccctttaaaacgcgtaacatacattgcctgcgtttaactttctttgaactcttgcagaaaaatgagaattcgtgagtacgatcactcaaaatcgcctggcaaaaataaaatcaccctatagatgcacaaaaaacgggcaaaactacctggttcgcaaaactgcgtctaaagttaaaccgggacctcgcgagcaagggtgagacgatggcgctttacacaattggtgaagtggcgttgctttgtgatattaatcctgtcacgttacgcgcgtggcagaggcgttacggattgctgaaaccgcaacggacagacggcggtcatcggctgttcaacgatgccgatattgaccggatccgcgagatcaaacgctggatcgacaacggcgtgcaggtcagcaaagttaaaatgctgctcagtaatgaaaatgttgatgtgcagaacggctggcgcgatcagcaagaaacattactgacttacctgcaaagcggcaatctacatagcctgcgaacgtggatcaaagagcgcggtcaggattaccccgcccagacactcaccacacatctgtttattcctctgcgccgacggcttcagtgccaacaaccgactctccaggcgctgctggcgatcctcgacggcgtactgatcaactacatcgccatttgtctggctagcgcacgtaaaaaacagggtaaagatgcgctggtggttggctggaatattcaggataccacccgtctgtggctggagggctggattgccagtcaacaaggatggcgcattgatgtcctcgcccacagcctcaatcaactacgccctgaactattcgaaggccgtacattgctggtgtggtgcggtgaaaatcgaacctccgcccaacagcagcaactcaccagttggcaagaacaaggccatgatattttcccactcggcatttaatgattcgttaacaaatgcgctttactgtacaatcctttcgttaacataaggagtgcattatgcgcatagctaaaattggggtcatcgccctgttcctgtttatggcgttaggcggaattggtggcgtcatgctcgcaggttatacctttattttgcgtgctggctaagcgcctgcaccagcctttcaaacaggcggtctgcgatgatcgccgccagtgccaccagtaacgccccctggatcacatacgcggtattaaatccgctaagcccgatgatgatgggcgtacccagcgtgctggcccctaccgtactggcgatcgtcgccgtaccaatgttgataatcacgctagttcgcacgcccgccagaatcaccggagccgccagcggtagctcgaccttacgcactcgctgaccacgactcattcccatacctttcgcaacttctgtcacgctggcatcaatcgctcccagcccggcaagtgtcgcctgcaggacgggcagcacaccgtaaaggatcaaggcgataatcgctggttgcagaccaaagccgatcaccggaacggcgatcgccagcactgcgacgggcggaaaagtctgtccaacggcggcaatagtttccaccagtgggcgaaattccgcgccccacgggcgagtgacagcaattccggcaccagtgccaatgatcaccgcaaacaaactgctaattcccaccagccagaaatgagccagtgccagagctgcaaaactttcttgctgataaacgggtcgtggcagttgtgggaacaaggcagcaaacagcggctggctgtaaggcagccagaaaatcagcgccacaaacagagcaatgagccagaacagcggatcgcgcaacatcttcatacgcttacgcctccaccagcagatcctgaaaatgcagcgtgccgcaaggctggccctgcatgttcaccaccggcagcacctcgcatccccgcgcaacaaacagagagagcgcatcgcgtagcgtcatctcttctgccagtgcctcaccatctgctcgttcttcgcgacgcacgtaatccgccacactacgtaagctaagcaggcgcacacccagttcactacgtccaaaaaactggcggacaaaatcattcgccggacgagtcagcatcgtcagcggattgccctgctgcactacttcaccgtgatccatcaataccagatgttctgccagccgtagcgcctcatcaatatcatgagtgaccagcacaatggtacgccccagcaaacggtgaatgcgcgtcatctcttgttgcaacgcgccgcgcgttaccgggtccagtgcgccaaaaggttcatccattagtaagacttgcggatcggcagccagtgcacgcgccactcccacacgttgctgctgaccaccggaaagctgatgcggataacgctcacgcaaattactctccagccccagtagcgccattaattcgtcgatacgatcgtcaatccgcgcccggctccatttttgtaattgcggcacggtagcgatgttttgcgccacgctccagtgggggaacaggccaatagattgaatggcatagcccatccggcggcgcaactccagtactggcaggctgcgaatttcttctccggcaaagcggatctctccgctgtcatgctccaccaggcggttaatcattttcagggtggtggatttgccggagccagatgtgccaatcagcacgctaaaactcccttcctgaaaattgagattgagatcgttaacggctttttgtgcgccgaacagtttgctgacatggctaaattcaatcattacgtttcaccttcagcagtgcgataagcaaatcgaacagcgcgtcggtaagcaccgccagaacaattaccgggatcacccccagcaacactaaatcaatggcgctgcttagcagcccctggaaaaccagcgcaccaaaaccgcctgcgccgattaacgccgcaatcaccgccatacctacagtttgcaccatcaccacccgcaggctgcgcagaaataccggtaacgccagcggtaactgaacatgcaggaaacgctgcgccccgctcatccccatcgctctggcgctttccagcacatcgcgcgggatctggttcaaaccgactaccacgccgcgcaccagcggcagcaaggcatagagcaccagcgcaatcagtgcgggtgtcattccggttcctgctatgccgagcgtccccagccacggaaaggccgtaaccagcgcggcaagcggcgcaatcaacaggccaaagagcgccacgctaggcacggtctgaatcacattgagcagagaaaaaattgccccctgccgagcagtggaaaagtagcaccagatgcccaacggcacaccaatcactaacgcaggcagcaccgcaccaaacagcaacgtcagatgttgtgccagcgcgtcgtcaaacacatcctgacggttggcgtattctttcattagactgagatcgttaagcgtgccggagtacagcaaccacagcggaataatggcaatctgcatatgcaacaaccagcgccacagcggatgcgtggagattcggcggatggcatcgctacaggccagcaatgccagcgccgcagccagccagaaaccactgccgaggctggtacgcgccagcgcactgccattttgcgccagttgggtcgccgcctttccagctccccacaccagcaatacgaagacgaattgcgccagaatgagtgcacaaatgctgccttttttaccgggaataaaacaggccgtcagccaggcgcaaccaacgcccaccagcatccagatcgtttgcggccacagctgccagagatgacgcccctcaccgctaactaaacgattaggcgcgtaactgataaacggcagcgccgctgcgattgccgtcagcaacagcagcagcgccagaacaggattaatacggaaataagtcacgggaaattacttcgtccaccctttttgtttcaggtagtcggcagccacttttttggcatccagtccttccacagcaatgctggcattcagttgctgcaatgtttttgcatcgaggctggcgaagactggctgtagccactgtgccatttgcggatactccctcaacacgctctcacgcaccactggtgcaggcgcgtagataggttgcacaccttgcggatcgcttaaggtttgcagccccagcgccgctaccgggccgtcagtgccgtaagccattgcagcattaacgccagaggtttgctgggcagcggctttgatcgtcaccgccgtgtcgccaccagccagactcagcaactgatcctgaccgagcttaaagccataggctttttcaaacgcgggtaacgcatcggcgcgttcgataaactctgcgctggctgccagtttgaaggtgccgccctcttgcagataacgactcaggtcggcaaggctagtgagtttatttttctctgccacatcctgacgcacggcgatagtccaggtgttatttgcaggcgcgggcgtcagccagattaacttgttgtgctcgctatcgagctttttgactttctcgtaaccttgctgcgcgtttttccacgctgcatcgttttcatctttaaagaagaaagcgccattgccggtatattccggatagatatccagttcaccggaagtaatcgccccgcgcaccacaggagtcgttccgagttgcactttattcaccgtcggtacgccgtggctttccagcacctgcaaaatgatattgccgagtagcgcaccttcggtatcgattttactaccgactttaacgggggaagccgcctgtagcggcaggctcacggctgccaacataaccagactacctgcccagagctttaagagtggcatgatgctttcctcattcttttactgttgttttcagcgaattaagagaaaagcatagttgataatggcggggttagcttgagcggaaggattcagttgcagaatcagataaatacttaagaggcatattcggtccggcgtttcctgccggatgcggcgcgagcgccttatccggcctacaaagggcgcaaacgtcgcgcccttactaaagcattacagcaactcaaactcgcctttcttaacgcgtgcggaatcagtgccgataaagacattgaacttgccaggctcggcgtcatatttcatctgttgattccagaacttcagcgcctcaatatcgatcgggaagctgacagtctgagtttcgcccggtttcagggtgattttctcaaagcctttcagctgtttcacagggcgactcatggaagccgtcacatcctgcaagtacatctgcactaccgtggcaccctcgcgcttaccggtgttcgtcacctgcacgctggcagtcactttgccgtcacgcttcatggtcggcgcagaaagtttcacatcagagacggtgaaagtggtgtagctcagcccatagccgaacggatacaacgccccgttagcttcatcaaaataacggctagtgtatttgttcggcttgtcggcattatacgggcgaccggtattcagatggctgtagtacaccgggatctgcccgacagaacgcgggaaggacattggcagcttgccggacgggttgtaatcgccaaacaatacatcggcaattgcattaccgccttcagtccccgcaaaccaggtttccagaatcgcatcagcctgctgatcttctttcaccagcgccagcggacgcccgttcatcagcaccagcaccagcggtttaccggtggctttcagcgccgcaatcaagtcacgttggctttgcggaatagtgatatcggtccggctggaggcttcgtgcgccatcccctgtgcttcaccgactacagccaccaccacatcagattgtttcgccgtctgcaccgcttcatcaatcatctcttgcgggctacgcggatcgactttgaccgcttcttcatactgattcaggaaatcgataatgcctttgtcactggtaacgttcgcccctttggcatacagcactttaccgttttcaccgacggcatttttaatcccggtcagtacggtcacggattgatcggcaacaccggctgcggaccagctgcccatcacgtcacgtttactgtccgccagtggcccaaccaccgcaatggtggcgctttttttcagcggtaacgtttcgagacggtttttcagcaacaccaagctttcgcgcgccacttcacgcgcttctttacggtgcaggcggctttcggcattggtatccaccgggtcagactctttcggccccaaatggctgtatgggtcgttaaacaaccccatatcatatttaacgttcagtacatggcgggcagcatcgtccagctctgccatcgtcactttgccggatttaatcaacccaggcagatacttgctgtagtactcgtcgctcatgctcatgttgattccggatttcagcgccacgcgcaccgcatcttccgggtctgccgccgtgccatgtttaatcagctctttgattgcaccgtgatcggaaacggtgatgcctttaaagccccactggtcgcgcagaacatctttcagcagccaggaatcggaggtggctggcgtgccgttcaggctgttcagcgccaccatcaccgcgccgctgcctgcgtccagccccgctttgtacggcggcatataatcattaaacaggcgctgcggactcatatcgacggtgttgtactctttaccgccttctaccgcgccgtatgcggcaaagtgtttgacgctggtcatcacgctgtagcgatctgccgggcttttaccctgcatcgcttccaccatggttttacccattgtactggtgagatacgtatcttcgccaaaaccttcggaagcacgtccccagcgcggatcgcggctgacatcgaccatcggtgcccaggtcatattcaggccatcatctgccgcttcataagcagagacacgtccgaccgttttcactgcatcgaggttaaaagagctggccagaccgaggctaatcgggaacaccgtgcgctgaccgtgcagcacgtcgtaagcaaagaaaagaggaattttcaggcggcttaattccatcacctgatcctgcatggcgcggatatcctgacgggttacggtgttgaaaatcgccccaacctgaccgtctttgatcatctcgcggatcgcctctttcgggttatccgggccgacgctgattaagcgcagctgaccaattttctcatcaactgtcattttcttaagcagttcggtgacgaacgcatcccgcgcttcgggcgttaatggatggttgccgaataaatcatccgccagtgctggctgcagggccagactcaccgcgattcctacactacatagccatttcatatggatttttcttcctttgttgcccgacgtggcagcgaaaatggtgcaaaaaccgtagtttgccataagcatgatggagagagaaaaagaatgctcagtttattgtctgaattttcaaaatattcactcgctgaattgttatacaaggcgctattctagtttgtgatattttttcgccaccacaaggagtggaaaatgtcttccatgacaacaactgataataaagcctttttgaatgaacttgctcgtctggtgggttctagtcacctgctcaccgatcccgcaaaaacggcccgctatcgcaagggcttccgttctggtcagggcgacgcgctggctgtcgttttccctggcagtctactagaattgtggcgggtgctgaaagcctgcgtcaccgccgacaaaattattctgatgcaggccgccaatacaggcctgaccgaaggaagcacgccaaacggtaacgattatgatcgcgatgtcgttatcatcagcaccctgcgtctcgacaagctgcacgttcttggcaagggcgaacaggtgctggcctatccgggcaccacgctctatagcctggaaaaagccctcaaaccgctgggacgcgaaccgcacagtgtgattggaagtagctgtataggcgcaagcgtcatcggcggtatttgtaacaactccggcggcagcctggtgcaacgtggcccggcgtataccgaaatgagcttattcgcgcgtataaatgaagacggcaaactgacgctggtgaaccatctggggattgatctgggcgaaacgccggagcagatccttagcaagctggatgatgatcgcatcaaagatgacgatgtgcgtcacgatggtcgtcacgcccacgattatgactatgtccaccgcgttcgtgatattgaagccgacacgcccgcacgttataacgccgatcctgatcggttatttgaatcttctggttgcgccgggaagctggcggtctttgcagtacgtcttgataccttcgaagcggaaaaaaatcagcaggtgttttatatcggcaccaaccagccggaagtgctgaccgaaatccgccgtcatattctggctaacttcgaaaatctgccggttgccggggaatatatgcaccgggatatctacgatattgcggaaaaatacggcaaagacaccttcctgatgattgataagttaggcaccgacaagatgccgttcttctttaatctcaagggacgcaccgatgcgatgctggagaaagtgaaattcttccgtccgcattttactgaccgtgcgatgcaaaaattcggtcacctgttccccagccatttaccgccgcgcatgaaaaactggcgcgataaatacgagcatcatctgctgttaaaaatggcgggcgatggcgtgggcgaagccaaaagctggctggtggattatttcaaacaggccgaaggcgatttctttgtctgtacgccggaggaaggcagcaaagcgtttttacaccgtttcgccgctgcgggcgcagcaattcgttatcaggcggtgcattccgatgaagtcgaagacattctggcgttggatatcgctctgcggcgtaacgacaccgagtggtatgagcatttaccgccggagatcgacagccagctggtgcacaagctctattacggccattttatgtgctatgtcttccatcaggattacatagtgaaaaaaggcgtggatgtgcatgcgttaaaagaacagatgctggaactgctacagcagcgcggcgcgcagtaccctgccgagcataacgtcggtcatttgtataaagcaccggagacgttgcagaagttctatcgcgagaacgatccgaccaacagcatgaatccggggatcggtaaaaccagtaaacggaaaaactggcaggaagtggagtaaaaattacggatggcagagtatcgccatccgaattcacttaatcgttctgtgccgtctgccccgccgccgccatttgggcggctttttgttttttatagctcaacgctgctgccggcacaggcatcactttaccggtttcaatccaggtacgcaggcggctggcatcggcaaaatgggtatatttgccaaacgcgtccatcactaccagcgccaccggtttattattgataaccgtacgcatcaccagacaatggcccgccgcattggtaaagccggttttggttaactgaatattccagttatcgcgatacaccagatgattagtattgcggaacggcagcgtatacgtcggattagagaaggttgccatatcttcccgggtagtacttaactgcccgatcaacggatattgtttgctggcaatgagcagtttggttaagtcacgggcagtactaacgttatgcacgctcaatccggtaggttcaacaaagcgcgtgttgttcattccgaggcttttcgctttcgcattcattgccttaataaaggctttgtaaccaccgggataatggtgcgcaaggcttgccgccgcgcggttttcactagacatcagcgccagcaacagcatatctttacggctgatttcgctattcagtcgtacgcggctatagacccctttcatctccggcgtctggctgatatccacttttagtttttcatccagcggcagtcgtgcatccagcacaaccatcgcggtcattaatttgctgatagacgcaatcggacgcaccagatccgggtggttgctatagatcactttgttggtattcagatcaacaatcatcgcgctaccggaggcaatttccggttgactagcggtggtagcggctgccgttttcgcaacggcctgcggtgcaaaaggcacagccagcatcagggccaggctaaataaagaaactcgaaatttcggcatgatgagcattcagatagtggttcacgcgcacgggttgcgcaccgccggagtaaggatttactgaggctagcgacgccatcataacgagcaaaaagtgcgatcgtcaaaggagaatcgtgaggaaatgctgcattgctgacatttacgccagcaatgcaacgtcaaagaactttttagaacaaacgataaccgtagccccatagtataacggttagggcgagcagcacttccagtaccagcacgccaatcgccagcgtgctactagagaagctaaggccttcctctttgttgatattcaggaagctcggaataccaaggtaaagcaggtagccggtgtaaaacagcgccaccgtgccgaccagcgcacacaaccagaccagtggataaagcgccaccagaccgcttaaaaacagcggagttgcaacgtagcccgcgaagaccatgcagtgcgcaagactcggacgctgcggataattacgcgccatccaccagatgacccgccccatcaccgcgaccccagccagcataacgccgtaaaacaagacagccagcgccagtccggtaaaccaggataacttcaggatagtgccatcgccaaaattccagccaatctgtgtagtgccaatgaaggcgcaaatcaccggaatcgccgccatcagcaaaacgtggtgggtgtaatggtgagaaatcgtttcgttttcgcgattaatcacctgcatttcacgatcgggatgggaaaacagtccccagacatggctcataccgcccccttgttgtgagttcatgaacctgacagttcaagtataagtcagcttgtgattattttttgttcgcccatgtaattttcactgtctgatgaacgtcctttttcagcgtgaatgattcacagggtgtatgcttactggcaaccaaagggagacagactggcctatggatctcaatacacttatcagtcaatatggttatgccgcgctggtgatcggtagcctggcggaaggtgaaaccgtgactttgctgggaggcgttgcggcgcatcaggggctattaaagttcccgctggtggtactttctgtggcgcttggcggcatgattggcgaccaggtgctctatctgtgcgggcggcggtttggcggcaagctgttacgccgtttcagcaaacatcaggataaaattgagcgggcgcagaaacttatccaacgccatccgtatctgtttgtcattggtacgcgctttatgtatggctttcgggtgattggcccgacgctgattggtgccagccagctgccgccgaaaatctttctgccgctgaatattctcggcgcatttgcctgggcgttgatttttaccactattggttacgctggtggtcaggtgattgcgccgtggttgcacaatctcgaccagcatttgaagcactgggtctggttgattctggtcgtggttctggtggtgggcgtgcgctggtggctgaaacgacgcgggaagaaaaagccggatcatcaggcgtaaaaccattgccctggataaggcgttcgcgccgcatccgacatccggagtaccatgcctgatacgacgcttgtgcgtcttttcatgccgaccaaaatattacccaatgaaatatccacgcacctcactgcgttattctgggttgaactgtggattcgccaacataaagccgccatccactatcaagctctgcccggtggtgtaatttgcgccctcgctacaaagccacaccaccaggctggcaatctcatgcgttgcgccaaaacgccgcaagggaatgctaggctccgcgtcgggcttcacgtcgctgtcatccatgccattcattggcgtggcgatcgccccaggcgcgactgcgttcaccaaaatcttatgcctgaccagctccagcgccatcgctttggttaacccaccgagcgcatgtttagcggctgtgtaggcgctggcatccggcagcggcgtatgttcatgtacgctcgtaatgttgatgatgcgaccgccctgcccttgtttcaccatctgacgagccgcaatttggctgcataagaatgcaccatcgacatcaacggtaaaaatcttgcgccactcatcaaaagccatatcaagaaacggcgctttggtcattgcacccgcattattcaccagcacatcaatgcgccccagccgttgaatgagtttctccagcgccagtgccccttctggtagattgccgagatccagctgcacgatctccgcacgtacgccgtggctaactacctcacgcgcggtatcttttgccccttcttcatcactgtgccaggtaataccaatatcaaacccctgctgcgccagtaataacgcgcactctttgccgatcccgctatcggaggcggtaataatcgcaacctgtgccatcgagttctccacttaacgctgaataaacgttaagtatagaaggcgcatatcatcagcgtttgtaccccccgcccaacgcaccagtgagttgaatggaggcatccagccactgcccttgcaataacaggccattggcccgctcacgcagcgcggggattctggcttcgctgacgcgggaaccagcaatgatgcccgcgttaaagcgcgcctgcgcaagacctaccacacgcaaggcatcgcgctcaatttgcgcctgatgctggtttttctccgccagtgtctgaacctgactggctgcccgcgccacgtcattcaccgcttcaaccaccgctttgttgtagctggcgatagacaagttgctttcggcttttgcgatatcgagattggcgttaagacgaccactatcgaaaatgggtagcgtcaggcctgccgtaacgcccatttgctgcgcggaatgacggaacagatcgcttaagtgcaacgcatcctgttgcaggaaggccatcaggttgatgtcaggataaaatgccgcttttgccgcatcaatggtgcttaggctactctcaacgtaccagtgcgccgcctgcaaatctgcccgccgggccagtaaggagtaccccagttcatcaggaagctggcttgccactttcggcaacgcgaccggtttaagcttcaaactctttgtctggttatttgtaagtgcgcttaaccgtgcctcaataattttcattttccccgcgacatcgttgagctgctgccgggttttgctggcattaatatcggtttccacaccttcaacactagaagtaatcccgttctgatatagctggcgatcggtcgcgataatggtgttctgctctttttctatttgctgcaagaccgtgtttaacgccgcctgggtttgccactcccagtacaggcgggctacgctgccagccagcaattggcgggtttgctcgcgttccgccgcccgtgctttaaccgtacccaggcgggcagtaacctccgcccgattctttccccagatatcgagatgccagcccgccgttaagccaaaagtaccgttggtgtaccacgggccggtcgtacctgcggccggatcgttcagagcaaacggccccattaagccttctgcgctcattttttgccgctccatatccgccgaaaagtcgatctgcggaccatcctgagtggcaactgccttcgcctgggcttcagctagctgaatgcgctgttcagccacctgcatatccggtgcgttctgtagtgcattgttaattaaggaagactgttgattatcgtgatactccagccaccattggctgtctggccaaccattttcagcgccgtgggtaatgcggtgtcaacttgtgcagcgggcgtttgctggcttaacgcctggcgggtttcatgcataggcgcacacccggccagcatcagtaacagcggaaaacaggcgatggctggataaaaggaatcacgattcatgggggaataatcaggtaagaaaaggtgcgcggagattaccgtgtgttgcgatatattttttagtttcgcgtggcaatacatcagtggcaataaaacgacatatccagaaaaatatacactaagtgaatgatatcttccgatttatcttaatcgtttatggataacggcaaagggcttcgttttttcctatacttattcagcactcacaaataaaggaacgccaatgaaaattatactctgggctgtattgattattttcctgattgggctactggtggtgactggcgtatttaagatgatattttaaaattaattaatgtcatcaggtccgaaaataacgagaatatttcagtctctcatcctgttgcgctcctgtcatgtgcattgcttcatataatcactggcgcaaggagcgcgcagggggcggccaatcgccgccgccccctgcacccccgggctctggcgaacaaaatcgccgctgcgcggtgccctcggcttatcccttacggctaccgggtcgggcgcgaggtaacatccctgtaaaacgcgccctcagcccacatccatgtgggctgccccggccttcagggaacgcctcggcaattttgacgccaccaaacaaccgtgcggcctattgataaagagctaacacattgtcaaaaaacatcactatggttttttagagtttctcgatatcaattgcctgaatagcccttgcaatatcaggggaattattcaacacccgaacatgctgaaataattccgttgcttcatcgtattctttacgcaaataactcaaccactgtttaatccgcgcaacgtgatataacccggtatcgccctgcttttccagacgggtatatttttgcagcaaagcaaccacctccggccacggcattcgcggttcgttatattttaccacccggctcaggttgggaatattgagcgccccgcgaccaatcatcactgcgtcgcagccgctgatcgccatgcattgttgcgcgctctgccagtcccagatttcaccgttggcaatcaccggaatattcagccgctggcgaatatcgccaatcgcctgccagtcaatatgctccgcgcggtaaccctgctctttcgtccgcccatgcaccaccagctccgtagcgccagcctgttgaaccgcatcggcgatttcaaatttcttctcaccgctgtcccagcccagacgcactttcacgctgacgggcaaatgcgccggtacagcttcacgcatcgcttttgcaccctggtagatgagttcaggatctttgagtaacgtcgccccgccgccgctaccgttaaccgttttgctcgggcagccgcaattgagatccacgccccaggaacctaactccaccgcacgggcggcgttctctgccagccattgtgggaactgacctaacaactgcacgcgcaccagcgtaccagatggtgtccggctggcgttttgtagctcagggcaaatgcgatgaaagacttttaccggcagcagttgatccaccacgcggacaaactcggtgatgcacagatcgtagtcgttaacttcggtcagcaattcacgcaccagagagtcaagcactccctccatcggtgccagtaacacacgcatatcatcacccgcaaaaaaatgaggcgctatgttagcgcctatggtcagcggattaaaggtctgcaaagagggattgctgcaaactgcaatccctctctatgcttgatgtatgcctgagttcgctgcgcattgcgtaatgccggggagcgaaaaaataagcgctgatttcttaatgtgatcggtagcacgttttacgaattaattgtatgatgaatccatctcatctggggtgttgattatgagtaagacactgaacattatctggcaatatttacgcgctttcgtcctgatttatgcctgcctgtatgcaggcattttcattgcttccctgctaccggtaaccattccgggcagcatcatcgggatgctgatcctgtttgtcctgctggccttgcaaattcttccggcaaaatgggtcaatccggggtgctacgtactgattcgctatatggcgctattgtttgtgccgattggcgtaggcgtcatgcaatattttgatttgctccgcgcacagtttggcccggtagtggtttcctgtgcagtcagtacgctggtggtttttctggtggtgagctggagtagccaactggtacacggtgaacgtaaagtcgtaggtcagaaaggaagtgaagaatgatggcgaatatctggtggagtttaccgctgacattgattgtcttttttgccgcccgcaaactggcggcacggtataagtttcccttgcttaacccgttgctggtagcaatggtggtgatcattccttttttaatgctgactggcatctcttacgacagctactttaaaggtagcgaagtgctaaacgatctgctgcaaccggcggtcgtcgcgctggcctatcctttatatgagcagctacaccagatccgcgcgcgctggaaaagcatcatcaccatctgttttatcggcagcgtggttgcgatggtgacggggacttccgtggcattgttgatgggcgctagtccggaaatcgccgcgagtatcctgccgaaaagtgtcaccacgcctattgcaatggcggttggcggcagtattggcggtattccggcaatcagcgcagtttgcgtgattttcgtcggcatcctcggcgcggtatttggccatacattgcttaatgcgatgcgtattcgtaccaaagctgcgcgcggtctggcaatggggactgccagccacgccctcggtacggcgcgctgcgccgagctggattatcaggaaggtgcatttagtagcctagcgctggtgttatgcgggataattactagcctgatcgcaccgttccttttcccgattattctggcagtaatgggctaaaatttgcgatgcgtcgcgcatttttgatgtatgtttcacgcgttgcataattaatgagattcagatcacatataaagccacaacgggttcgtaaactgttatcccattacatgattatgaggcaacgccatgcatccacgttttcaaaccgcttttgcccaacttgcggataacttgcaatctgcactggaacctattctggcagacaagtacttccccgctttgttgaccggggagcaagtcagtagcctgaagagcgcaacggggctggacgaagacgcgctggcattcgcactacttccgctggcggcggcctgtgcgcgtacgccattgagcaattttaatgttggcgcaattgcgcgcggtgtgagcggaacctggtatttcggtgccaatatggaatttattggtgcgacaatgcagcaaaccgttcatgccgaacaaagcgcgatcagccacgcctggttgagtggtgaaaaagcgcttgcagccatcaccgttaactacacgccttgtggtcactgccgtcagtttatgaatgaactgaacagcggtctggatctgcgtattcatctgccgggccgcgaggcacacgcgctgcgtgactatctgccagatgcctttgggccgaaagatctggagattaaaacgctgctgatggacgaacaggatcacggctatgcgctgacgggtgatgcgctttctcaggcagcgattgcggcggcaaaccgtagccacatgccttacagtaagagcccaagcggtgtcgcgctggaatgtaaagacggtcgtattttcagtggcagctacgctgaaaacgccgcattcaacccgactctgccaccgttgcagggagcgttaattctgttgaatctcaagggttatgattacccggatatccagcgcgcggttctggcagaaaaagccgatgcgccgttgattcagtgggatgccacctccgcaacgctgaaagctctcggctgtcacagtatcgaccgagtgcttctcgcttaagcctggtgccggatgcggcgtgaacgccttgtccggcttgccagccctctcctggtgtcgaaattcccggcaaacagtttgccgtttcttgcgcaaaaccagcgggtaaagtagcctgatggaaattttccttagatcgagtctcctgcatgttaaagcgcgtgttcctcagcctgttagtcctgatcggcttgctgctgttgactgtgctcggcctcgatcgctggatgagctggaaaaccgcgccttatatctacgacgaattgcaggatctcccctaccgccaggtcggtgtggtgctcggaacagcaaaatattatcgtactggcgtaattaatcagtattatcgctaccgcattcaaggagcgattaatgcctataacagcggtaaggtaaattatctattactgagcggcgataacgcattgcaaagttataatgagccgatgaccatgcgcaaagatttaatcgctgctggtgtcgacccaagtgatattgttctcgattacgcaggctttcgtacgctggattccatcgtgcgtacacgcaaagttttcgatactaatgatttcattattatcacccaacgtttccactgtgagcgagcattatttattgcgctgcatatggggattcaggctcagtgttatgccgtaccgagtccgaaagatatgctgagtgtacgtattcgtgaatttgccgcccgtttcggtgcgctggctgacctttatatttttaaacgtgaaccgcgttttttagggccgctggtccctattccggctatgcaccaggtaccggaagatgcgcaggggtatcccgccgtcacacccgaacagttacttgaattacaaaagaaacaaggaaagtaattatggatgtacagcagttttttgtcgttgccgtttttttccttatcccgatattttgtttccgcgaagcatggaaaggctggcgcgcaggcgcgattgataaacgggttaaaaatgcaccggaaccggtgtatgtctggcgagcaaaaaatcccggactctttttcgcttatatggtggcatatatcggcttcggaattttatctatcggcatgattgtttatcttattttctatcgttaatattcccctctccagttaattattgagaataattattacttcacctgataagctgcggatatcacattcctaaccgcagctatttgtgaatcttttcacagtttaaattcccccgcacgcttagccttaatatcagtacattattatttactaaacgctcgccttaattacctatagcattaaggaagatcacatgccgcaacaaaattatctggatgaactcactccggcttttacgtctttactggcgattaaagaagcctctcgctgtttattatgtcacgacgctccctgtagtcaggcttgcccggcacagaccgatccggggaaatttattcgcagtatctactttcgtaattttaaaggcgctgccgagacaattcgcgaaaataatgccctcggtgccgtttgtgccagagtgtgcccgacggagaaattatgccaaagcggttgtacccgtgccggtgttgatgctcccattgatatcggccgcttacagcgttttgttactgattttgaacaacaaaccggaatggaaatttatcagcccggtactaaaacgctcggcaaagtcgcgattattggcgcaggtcctgccggattgcaggccagtgtgacactgacaaaccagggttatgacgtcacgatttatgagaaagaagcgcaccccggtggctggttgcgtaacggtattccgcaattccggttaccgcaaagtgtgctggatgcagagatcgcccgtattgaaaaaatgggcgtgaccattaagtgcaacaacgaagtcggtaacacactcacccttgagcagctgaaagcagaaaaccgcgcggtactggtcaccgtggggttaagtagcggttccgggctaccgctgtttgagcatagtgacgttgagattgccgtcgacttcttgcaacgtgcacgacaggcgcaaggcgatatcagcattccacaaagcgcattaattatcggcggcggtgatgtcgcgatggacgtagccagcacgctgaaagttctcggctgtcaggcggtaacttgcgtagcgcgtgaagagttagatgagtttccggcaagcgaaaaagagtttaccagcgcccgggagctgggcgttagcatcatcgatggattcacgccagtagccgtggaaggcaataaagtcacgtttaagcatgtacggttaagcggcgaactgacgatggcggcagataaaattattctcgccgtcggtcagcatgccagactagatgcctttgcggagttagagccgcagcgtaacaccatcaaaacacaaaattaccagacccgcgacccgcaagtctttgctgctggcgatattgttgagggtgacaaaaccgtggtctatgccgtgaaaaccgggaaagaagccgccgaggcgattcatcactatttagagggagcttgcagttgttaaattaatatttagagggagcttgctcatgttaacgaaagatcttagcattactttttgcggcgtgaagtttcccaacccgttctgcctctcttctagcccggtaggcaactgctatgagatgtgtgccaaagcctacgacacaggttggggcggtgtggtgtttaaaacgatcggcttttttatcgccaacgaagtcagcccgcgttttgatcatctggtgaaagaagataccggttttatcggcttcaaaaatatggagcagattgctgaacatccgttggaagagaatctggccgccctgcgtcggctgaaggaagattacccggacaaagtattgatcgctagcatcatgggggaaaatgagcagcaatgggaggagctggcgcgcctggtgcaagaagctggcgcggatatgatcgagtgtaacttctcctgtccgcaaatgacttctcatgcgatgggtagcgatgtcgggcaaagcccggagctggtagaaaaatattgtcgggcagtgaaacggggttccacgctgccaatgctggcgaagatgacgccgaatatcggtgatatgtgcgaagtggcgctggcggcgaagcgcggcggcgcagatggcattgcggcgattaacaccgttaaatccatcaccaatatcgatcttaatcagaaaatcggtatgccgatcgttaacggaaaaagcagtatttccggatattccggtaaagcggtaaaaccgatcgccctgcgcttcattcagcaaatgcgcacccatccagaactgcgcgatttcccaatcagcggtatcggcggcattgaaacctgggaggatgcggctgagtttttattgctcggcgcagcaacgttacaggtgaccaccggcatcatgcagtacgggtatcggatagtggaagatatggcaagcgggttgagccattatctcgccgatcagggatttgatagcctgcaggagatggtaggtctggcgaataacaatattgtcccggcggaagatttagaccgcagttatattgtctatccccgtatcaatcttgataaatgtgttggctgtggacgctgttatatttcctgttacgacggcggtcaccaggcgatggaatggagcgagaaaacccgcacaccgcattgtaataccgagaaatgtgtgggttgtctgctttgtggtcacgtctgcccggtgggttgtattgagctcggggaagtgaagtttaagaaaggcgagaaagaacacccggtaacgttgtaaaaccagagacgcatccggcatttggttcctgtcgccggatgcggcttgaacgccttatccggcctacaaaaccatacaaatcagtatgttgagcttattgtaggccggataaaacgcgccagcgttgcatccggcatttggctcctgttgccggatgcggcgtgaacgccttatccggcctacaaaaccacacagatcatgatgttatgtgcgtttatgaccgaatgcggaccacattcacatcatttcttacgcgcgtatttcagactatccagcgctacggcgaagataataatcgcccctttgatgatgtactgccagtatgggtttacgccgatatacgtcaggccatagttgatgacggtaaaaataattaccccggtcaccacgccaatcaccgtccccacaccgccgctgaagcttacaccgcctaccacgcacgccgcgatagcatccagctcatacataaagccgaggttgttggtggcagagccgatacgtccggcttctaacatcccgccaaaggcatagaacacgccagacaacgcgtagatcatcagcaggttcaggccgacgttgacaccagatacttttgccgcttccgggttaccgccaatggcaaaaatgttcttaccgaagcgggttttgttccacaacacccagacgaacgccaccgcaatcaacgcgtagaaggtgatgtaagagagacggaaactccccagcgcgacaaagccctgagcaaaggtagagaagccactgtcaaaaccagaaattgggctcgccccgacaaagtcgtaatagaggctgttgatgccatagacgatgatcatcgtgccgagcgtggtaatgaacggcgtcacgttgagataagcgataatcagaccgttgatcaaaccgatcaccgcaccaatggcacagacaatcagaataaccagcgcaatcggcatcgtcgccatttccgggaacactttgttggcgttatccatggactgcaataatgtcgcagccaccactgccgccagccctacctgacgaccagcagaaagatcggtcccctgggtgacaattaaccctgccacaccgagcgcgataataatacgcacgctactctgggtgagaatattacttaagttcaacagacttaaaaatgttgggtcctggaaaataataatcgccagcaaaactaaaagaacgacgtaaataccgccctctttcaggtaagtaagaaaacttttcttatttaacgcactcatgggaagcccctaatcttaaaggtgcaaagacgcaagacgcagaatttcgttttgcgttgttgtttttgtatcgacaattccggaaacgagaccattgctcatgaccagaatacggtctgttatccctaacaactcaggcatttcagaggagataataataatccccttgcctttcttcgccagttcggcaattaactgataaatttcaaacttcgccccgacatcaataccgcgcgtcggttcatcgagcattaatatttctggttgcgttagtagccagcgaccaataatcaccttttgctgattaccaccggagaggctaccaatttgcgtccgatgacccggcgtttttacccgcatgctatcaatcacccactgggtatcgcttttcatccggctgttatccagtaaaccaactttatttttgtagttgcgaatattggaaattaagctgttaaaaccaatatccagataggcataaattcccgtactgcggcgctcctcagttaccagtgcaaatccatggtttatggcttcgttggcattatggttattgatctgtttgccgtgcaacgttatggtgccagcgcttttctcgcgaataccaaataacgtctcaacaatatcggtacgtttcgcccccaccagaccggcaataccgaggatctcccctttatgcagatcaaagctgacatcgcgaatgctcggctggcgcagactcgtcaggttacgtacctcgaggatgacttcgcccggtttgttttctttgtcagggaaacgctggttaagagaacgcccaaccatcatggcgatgatcttgtccatcgtcagtcctgccagcggttcggtggcgatccactgaccgtcgcgcaatacggtaacttcatcacataactggaagatttcttccattttatggctgatataaacaataccgcagccgcgctcttttaatttacgaataatagtgaacagatgattgacctctttttcggttaagctagaagtcggttcatccataatcacaattttcgcgttataggaaaacgctttggcgatttcgatcatctgcatttggctaacggataatgtgccgacgcgcgcacgcggatcgatatcaatatccagttcgtcaaaaatcgctttggtttcgcggtacattttgtcctgatcgacaaacatgcctttggtgggatatcgccccagccacatgttatccatcacgctacgttgtaataccaggtttaactcctggtgtaccatgctaataccattttccagggcttcttttgcagaatggaaatcgatctctttaccctggaataaaatggtgccggagtctttttgataaataccaaacaggcattttaataatgtgctttttcctgcaccgttttcccccattaatgcatggatagaatgtggccggacttttaaattaacgttatcaagtgccttaacaccaggaaaggacttgttgataccgctcatttccaacaagtattccccggaggacggagtcgtactgctgaccatataattttaccttgttggccatacaataagggcgcagtaatagactgcgcccaatcagtcttatttcttgctgaattcagccaggttgtctttatctacgccaacataaggtacgcggaccactttgttgtcgattttccagttggtgccatcagccgcacctttaccatcggccaggtttttcgccagatcaaaggtcgctttcgcctggttgttagcatcgttcagtacggtgcccgccagtgcaccggatttcaccagcgccagcgcttctggcagcgcatcgacgccaaacaccggaatgctggacttgttgtgtgctttcagcgcttcaaccgcgcccattgccatcgcatcgttgttggcgataaccacttcgattttgttggcgttcgggccagacagccaggcgtccatcttatctttcgcctgagcggtgtcccacattgcggtatctaactgtaactgttcagttttgatgcctttatcgttcaattctttaatcacgtaagtggtacgtgcttctgcatccggatggcccggttcacctttcagcagtacgaactgaatctgaccgtctttgttcagatcccaaccctgattcgccgcccagtgtttagcaatcaaatcgccttgaataatgccggactctttggagtcagtgccaacgtagtaggctttgtcgtagctatccagcgccttacgagacggttctttgttgaagaaaaccaccggcacgttttgcccacgcgctttctcaatcaccgtacccgcagctgccgggtcaaccaggttgattgccagtgccttcacccctttcgccagcaatacgtcgatctgatcgttctgcttggactggtcattctgagaatcattcatcagcagctgaacatctggcgcggctttcgcatcttgctcaatagccttgcgcactacagacataaagttatcgtcgtacttatagattgttacaccaatgcgagtatcagcagcgtgtgcagcggcaccgaataacatgctggccatcacagcagacagggttaacaccttcttattcatggtatctccggtttttcttatgcagggtagtgcttgagataaatgctcggcggggcagtagagttaatgaagtgttactgaacgccgaagctcactttttaaaattcgttcttccatgcccggtaacgctccagaaaacggctttaattgttgttatgacgctgttacctcggcaaaagtgattattcactgttacatacgggttacaacgttaaaacggtgcaatcatagctatcacattgttaagatactgtgaaatcactcacagattgaaagcggttacatcgcctgatttgtactgttagtgatcgccgccgcattctggcgtgttgcgacagaatggcgacgcactaacgtcggcataaaacagtggctggcacgaggatcaatattgcctgctgccccctgcaaggccagttcggtggctaatttcgccatactagcaatgggataacgcacggtcgttaattgcgggtcggtgtaacgggcgatgggaatatcatcgaaaccgatgatactgagatgtaacggaatcgcaatgccattatcttttaatgctgtcagtgcgccagcggccatattgtcgttataagcaaatacagcggtaagttgtagattgcgccccagcagttcaaccatcgccgcctcaccgcccggcatgtccggcgtaccagcgccaatccagctttccggcggaataatatcctgctctttcaacgcactcatccagcctgctttacgcatggcgtcatcttcaatgccgtggctggaagaaagataaccaatacgttgatgaccgttattcagcaacatgcgcgtcgccattcgggcaccgctgagattatccaggcaaacgcaacgatgggcgtaccccggcacaacgcggttgattaacaccataccgggaatgttatccataaattgcgccagttcatcgtcactcaatgctttactgtgaacaatcaacgcattacaacgctggcgaattaacacctcaatggcgtgacgctctttttccgcttcatgatagctattgccgattagcacgtatttctgatgctgctgagcgaccagatccaccgcttttaccagcgcgccgaaaaacgcatcagaaacgtccatcaccaccacgccaatggtgtcgctaacctgagttgccagcgcctgggcattggcgtttggccgataatccagctcactcacggctttcattactgcttcacgcgtgtcggcactgaccagcgtgctgttattgagcacccgggaaaccgttgccacagagacgccagcctgacgcgctacatcacgaatggtgatcatattcactacctgttatgagattgcagtaaatgactgcttgctggcggctattttgtcagcactgaatacaggacttcgtgaatcgagtcacagcaatggaaacggttacagccgttttgttaacgaatgtgatccagatcgttatctacttgttttagatattgccggtccggcagcacgcaaagttaactgacgccagagccattccaccggcccctggcggaagtaacgcagccagataacagagaagaggatattcgccagccataccggaataacaaacgccagcagctccaggcggtcaaaatgcataaacaaaccgaggtggtaaaaaagcgtggtacaaatcagcgtttgcaatagatagttggtcagcgccatccgtccgacgcaggcgatcgcaagcaccagcttaaagcggctcaattgcggccagaagccataaaacaggctcgcatagccaatcgcctgaaacggcgcactcagttcccgcggcatttgaagtaagaaggcacaccagcgatacgcccagtccagctgccattgcagggcgatggcaggaaggttaatggtcaccccaatcgccaccagcacaaaaccagtacgacgatagtgacgtaagctgaactgccctttcagccagccgctgcgcatcagcgccgcaccaatgagcatcatccctgccagttgccagccatactgtgcgcccagtgccagtaaactgttgccaacaccatcggcacgattactgatcgcttcaacgccgccgtgaagcttccagtatttttcatacaaaatagcgcttgcatccggcgtccaggcgcggctggtctggctgtcggaaatcagccccaataacagcaaaacgccaagccccaccagataaagcatgacgcctgtattaaacaggctttttacgcttggcgcatcgcgcaccagccgccagcagattaagcccaccagcccgtaagccagcaaaatatcgccgtcccagaacaataaaccgtgaataaagcccaacaagactaacagcgttaaccggctctggatccagcgtctgccacggggcagcaacatttgcaggcccgcaccaaacagtagcgcaaaaagcgtgaggaatttcacctggccgatgagatcaagaaatgcccaagtccatgcatcccgcggcgtaatagcaccgtaccaggcgggattgagataagccgcctttggtagcccaaaggcgctgatgtttaatagcaggatccccagaatggcgacgccgcgaacaaaatcgagcgtgacgttgcgctccatggttcctgccttttaatcagttgtgatgacgcacagcgcgcagaaactcgtggcgcgtattctgactggatttgaacaatccaccaagagaggtcgttgtcgtggcactggttgcatcgcggatgccacgcgccttcacgcagtaatgcaccgcgtcgatgctgacagccacgttattggtgcccagcagcgtttgtagcgcaataagaatttgctgcgtcagacgttcctgcacctgcggacgctgggcaaagaactgcacaatgcggttaattttactcagaccgatcacgctatctttcgggatataggccaccgtcgctttgccatcgatggtaacaaaatggtgttcacaggtgctggtcagagtgatatcgcgcacggtgaccatttcatcgaccttcattttgttttcaatgagggtgattttcgggaaattggcgtaatccagaccggagaaaatttcatcgacatacattttagcgatgcgatgcggcgtttccatcaaactgtcatcagccaggtcgagattcagcagctgcatgatttcggtcatatgaccagcaataaggcttttgcgcgtttcgttatccatttcatgcacgggcgggcgcagcggtgtttccagtcctcgcgcaactaacgcttcatgaaccagggccgcttctttactgagacttggcatttatgatttctcctgcaggtgtgacgcctccgccctgcgtgggggcaaagttattaagctgatttacagcctgattattgtgcgtgaggcggcgcacataatccagtattcacagcgataattattgtaattgccgctgcctttcatcagcagatgttaaaacatcgttatgcaaatacggaagtgaaagttactcacagcacattgaataaacggtatgatgaagaaattgcaaacaacacaacaaggagccacgcatggaaatgctcgaagagcaccgctgttttgaaggctggcagcaacgctggcgacacgactccagtaccttaaactgcccgatgacgttcagtatctttctccctccacctcgtgatcacactccgccaccagtgctgtactggctttccggattaacctgcaatgacgagaacttcaccaccaaggcgggtgcccagcgggtagcggcggaactggggattgtactggtgatgccagacaccagcccgcgcggcgaaaaggttgccaacgacgatggctacgatttaggccagggcgcaggcttttatcttaatgccacgcaaccgccgtgggcgacgcattaccggatgtatgattatctgcgcgatgaattaccggcgctggttcagagccaatttaatgtcagcgaccgctgcgccattagcggtcacagtatgggtggtcacggtgcgctgattatggcgctgaaaaatccgggtaaatacaccagcgttagcgcctttgcgccaattgtgaatccgtgcagcgtcccgtggggaatcaaagcgtttagcagctatttaggtgaggacaaaaatgcatggctggaatgggacagttgcgcactgatgtatgccagtaacgcgcaggatgcgatcccgacgcttatcgatcagggcgataatgatcagtttcttgccgaccagttgcaacctgcggtactggcagaagccgcgcgccagaaagcgtggccgatgacgctgcgtattcagccgggatatgatcacagttactacttcatcgcctcttttatagaggatcacctgcgcttccatgcgcagtatttactgaagtgaaagtccgcccggttcgccgggcatcttctcatcagaagcgataatccactgccataaagtaacgacgtccgtcttcgttatagctgtagtcgtcacgactgagatccttgtcgccaaggttcagcacgcctgcgcgcagtttgacgtctttagtcacctgccaggccgcgccggtattccagatggtataaccgcccggtgttttagccgtcgcgctgtcggcgcgtttctgcccggtatagtgcccagaaacatagaaactccagtcttccagcgccagcggtttccagtccagcgtaccgttagcagtatggaacggcagatcggatagcggtttgttttcgccgttgctgacatcacgaccatcgttgtaggtgtagttgatgctcagtttccattcatcgttgaacggaattttcagttcggtttccacgccctgaatacgagctttgttaacgttgtagtagctaaataccggtatgcgccgtccgttagcgcccgtctcaaaaccaacaaagttttggtagcccggtgcagcgttgacgtcagacgtacggctgatgctgatacgatctttcacatcgttacggaaaacggtaacgctggattcaaccccttccagccagccttcttcacccatgtagtaaagccccagctcccaactttcgctggtttctggtttcagatccgggctacccacaatcttacatgcgccacggcaggaattgctcgtccagtcagggctaagttgcaacagagaaggtgctttaaatgccgtcgcccagccccctttcaccgttacggtgtcggtggcgttataaaccaggtaggcacgcggactccagtgttcaccgtaggtttcgtgatcgtccatacgcacgccggtcgtcagcgccagcggctcgaagatccgccattcatcttccacaaacagcgcgtactggctggcagacgttttggagctggttcccccggtcaggttcaccgcatcgctaagtttgtcgtgacgccattcaccgccaaccgtgagaaactgattaatcgccgtcagcggcaacgtgtatttgccgtcgaccgtattgctttcggaagttatcgggctgctgttgccagggtttttgttctcgactttctcaccgtagtatttcagttcgctggtgccgtaatcccaacgcccattatggctgacggagtagttctggcgttccaggcggtttttgtccaggctgtcggaatcacgatcctgacggtcgaaaccgtatccggcagtaaaatcgtgattttgattcggtgtccaggcaaattcgacattgccgtcgcggctggagaatccttcaatacgcggcgtttctccggtatcggtggtcgtactgttttgcgggtcatccttttcacgttttgccaggctgccgtaagctttcattcccagcacaccatcaattaatggtccactggtaaagaactgaccgttataggtgtcaccgcgatcgcgatgttcctgaatggtggtatcgacggtaacggtaccgctccatttctgaccgatttttttggtgatgatattcactacaccgccgagcgcatcggaaccgtacaggctgctcatcgggccacggaccacttcaatacgttcgatggaatcgaccgggatccagttcagatcgaaatcattgtggcggaagacggcattgcgggagttcacgcgtttaccgtcgacgagaatcagggtatagctgctgtccagaccacgaatactaacgcccttacggttatccccttcgttcgtcagttgtacgccaggcacttctttgaggacatccttcagattctgtaccggttttcgctgcaggtcttcctgggtaatgacgctgatactggcaggtgcatctttaagattttgttccacggaagatgcagtgacaaccatcgtttcgccatcatcatcgaccgctaacacaggccatgcacaagaaatagcggacaaacacagcccgacccgtacgaaagggttcaacctaaacattccatatctccatgaggtaactacgaaaataaaatgggttatcgctcacatcttcttcacgtccccttgcgtacggcagcatcgcggtggacttattttttatgcaggtgatcatcccagaaagccggaacagcctctgatttgtcagccttttttgattgcggcgtaacgataatgcaaacgataacaattatcaatccaaatgttaaattttatatccgcatgatttgtcagggaaatggaattgaaaaagccctctcggttgagagggcttagcaaggaagggaggaaacttatttcttatcgttctgcgggaacttcatttcgctgtagcgtacgaagtgagttcctttaatcagcttgtagccgaaccaaataatcaggaacagcgggataccaatatacgttgccgctacgccgccccagtcaatagtatctttcaggaacgcttcgtagttctggcccaaagtgataatcagacacagaatgaatgcgaagatcggccccagtgggaagaaaccactacggtacggcagatcgttaatgtcgtgtccctgcaatacgtaaccgcgacggaagcgatagtggctaatggcaatccccagccaggcgataaaacccgtcatcccggaggtgttcagcagccacaggtataccgtctggttgccaaacatggaggtcaggaagcacagaccggcaatcaccgtcgtcgcatacagcgcattacgcggcacgccaccacggctcagtttagcgaaaatgcgcggcgctttaccgtcacacgccagggtgtacagcatacgagtagacgcatacataccggagttacccgcactcagcaccgccgtcagaataactgcgttcatcaccgccgccgcagagagcagacccgcgtgctggaacaccagggtgaacggactaacgctgatgtctttaacatcgttacgcagcaggctcggatcggtgtacggaataatcaggctgataatcaggatcgcgaacacatagaacaacaggattcgccagaacacctgacgtaccgcgcgtggaatgtttttcgccggatcttcggactcgcctgcagcaataccgatcagctcggttccctggaaagagaagccgacaatcatagctacgccgatcatcgccgcaaaaccaccagcaaacggcgcttcgccgattgtccagttgctccagcccgcaggctgcgcgcctttgaagataccgataatcatcagcacgccaacgatgataaagacaataactgtcgtgactttgatcagactgaaccagtattccgcttcaccaaagccacgaacactgatgtagttcagcaggaagataacgccgaggaacaacgcactccagatccagcccggtgtatccgggaaccaccagctcatgaccagctgagctgcaaccaggtcaacggcgatagtcaccgcccagttgtaccagtagttccagcccagcgcgaagccaaagccttcttcaacatagttctgaccgtaagtggcaaagctaccggaaaccggcatatatgcagccagttcaccgagactggtcatcaggaagtaaaccatcaggccaatcagcatatagctgagcaatgccccgcccggacctgcctgagaaatcgttgcgccagaggcaacaaaaagacctgtaccgatggaaccgccaatggcaatcatcgtcaggtgacgcgcctttaattcacggcgtaagcccggcgcttctgtggttttagtttcggaaaccatacaaaaatgctatccatcttaaaaatgaggcgcgattgtagcagacgattggcaatccttccggcagaaatacacggttataagacaccttcatgatcgcccagggattataagtaaagcagccaatctcttttctggcgaatgcatgctgaaggcgctgcgtcacgaaatcgacacagcaccagcatgttcttgtacagcaacttaacgcggcacatttgcgggatcgcaatagtccagaaagcgccgtagcgcgttggaaaggtgtttttgccgatgatgtatacgccacaacgtacgcatcaggcgcggcagagggaccgcaacttcacttaatgtgcctgcctgcaattgatcttcaatcacacgtcggctcaggcaactaattcccaacccatgacgcaccgcatgtttgattgcctcggagttacctaattccatcgccatctcaaacttcggtaaatgactcagcaacagataatcgacaatctcccgcgtgccggaaccgcgttcacgcaggatccacggcgcagcggccagctgttctaaggtgaccggaccacgggccaacgggctagtcggcgcggcgaaaaccaccagctcgtcttccagccacggttcagaaatgatttcagtgctgtggcacggtccttcaataaagccaatatcaacgcggaaatccagcaccgcttgcatcacgtcctggctattcccaacgctaagttcaatcggcaactgcggataatcatggcgataacgggcgataactgcaggcagaatgtagttaccgatggtactactggcatagatacgaatcgcgccgttgtcttcgcgaaacagttgttcgatttcaaccgcctgttcaagcaatgccaacgcacgcggatagagcagccgcccgtgttcattaacaaccagtcttttccccacgcgatcaaacagttgcacgccaagctgcccttccaggtcggtcaaggctgcgctcactgcactttggctcaacgccagcatcacgctcgcctgggtggtacttccacttttcaatacttctgcaaaaacttccaactgccggagggtgatgtgcatagtcgcttaccacttataaagattaattataaatatataatcaattttatttttaaaccagttagtcgtaaccttatgcccggttaaaggagagggttatgacgaatatcaccttacagaaacaacatcgtacactgtggcattttattccggggttagccctgagtgcagttatcaccggggtcgccctgtggggtggttccattcccgcggttgcgggtgccgggtttagtgccctcaccctcgcaatcttgttggggatggttttaggcaacaccatctatccgcacatctggaaaagctgtgacggtggtgtgctgtttgccaagcaatatttattacgtctgggtatcattctttatggcttccgtctgacgttcagccaaattgccgatgtcggtatcagtgggatcatcattgacgtgttgacgctgtccagtaccttcctgctggcttgcttcctggggcagaaagtgtttggtctggataagcacaccagctggttgatcggtgccggtagcagtatctgtggtgctgccgcggtactggcgactgagccggtagtgaaagcggaagccagtaaagtaaccgtggctgttgcaaccgttgttatcttcgggaccgtcgcgattttcctctacccggcgatatatccgctgatgtctcaatggtttagtccggaaactttcggtatctacattggttctactgtgcacgaagtggcgcaggtggtggcggcaggtcatgccatcagcccggatgcggaaaacgcagcagttatttccaaaatgctgcgcgtgatgatgctggctccgttcctcatcctgctggcggcgcgtgttaaacagctgtctggggcgaacagcggcgagaaaagcaaaatcactattccgtggtttgccatcttgttcatcgtagttgccatctttaacagcttccacctgttaccgcagagcgtggtgaacatgctggtaacgctggataccttcctgctggcaatggcgatggcggcgctgggtctgaccactcacgtcagcgcgctgaaaaaagctggggcgaaacctctgctgatggcactggtactgtttgcctggctgattgttggtggtggtgcgattaactatgtgattcaaagcgtcatcgcataaaccactacatcttgctcctgttaacccgctatcattaccgttttcctccagcgggtttaacaggagtcctcgcatgaaatacattggagcgcacgttagtgctgctggcggtctggcaaatgccgcaattcgcgccgccgaaatcgacgcaaccgcgtttgccttgttcaccaaaaaccaacgtcagtggcgtgccgcaccgctcacgacgcaaaccatcgatgaattcaaagccgcctgtgaaaaatatcactacacaagcgcgcaaattcttccccacgacagttatctgattaacctcggacatccggtcactgaagctctggaaaaaagccgcgatgcctttatagatgaaatgcagcgttgcgaacagctggggctttctttgctcaacttccaccctggcagccatctgatgcagattagtgaagaggattgccttgcgcgtattgccgaatccatcaacattgcgctggataaaactcaaggtgtgacagcggtgatagaaaacaccgccggtcagggcagtaacttagggtttaaattcgaacatctcgcggcgattatcgacggcgtggaagataaatcccgcgtcggcgtctgcattgatacctgccatgctttcgctgccgggtatgatttgcgtactccagccgaatgcgagaaaacattcgcggattttgcccgtactgtcggctttaagtatctgcgcgggatgcaccttaacgatgcgaaaagcacctttggcagccgcgttgaccgccatcatagcctcggtgaaggcaatatcggtcatgatgcgttccgctggatcatgcaggacgaccgtttcgacggcattccgctgatcctcgaaaccatcaacccggatatctgggcagaagagatcgcctggctgaaagcgcaacaaactgaaaaagcggtagcctgaagatgaataaccgggaaaaggagatccttgcaattttacggcgtaacccgctgattcagcagaacgaaattgcggacatgctgcaaatcagccgtagccgcgttgcggcgcatattatggatttaatgcgcaaaggccggattaaaggcaaaggttacattctcaccgagcaggaatactgcgtagtggtggggacaatcaatatggatattcgcgggatggcggatatccgttacccgcaaagcgcttctcatcccggtacaattcattgcagtgcgggcggcgtgggacgcaacatcgcccacaatctggcgctgttaggccgtgacgtccatttgcttagtgtgattggcgatgacttttatggcgaaatgctcctggaagaaacgcgccgtgccggcgtgaatgtctccggctgcgttcgtttgcatggtcaaagcacaagcacgtatctggcaattgccaatcgagacgatcaaaccgtgctggcgattaacgatacccatctgctggaacagttgacaccgcaactactgaacgggagccgcgatttacttcgtcatgcgggcgtggtactggctgattgcaacctgacagccgaggcgctggaatgggtctttaccctcgctgatgaaatcccggtgtttgtcgataccgttagtgaattcaaagcgggcaaaatcaaacactggctggcgcatattcacaccctgaaacccactttaccggagctggaaattttatggggacaggcgatcaccagcgatgctgaccgtaataccgcagtgaatgcattgcatcagcaaggtgttcagcaactgtttgtttatttgcccgatgagagtgtttattgcagcgaaaaggatggagaacaatttttgctgaccgcgccagcgcatacgacagtagacagttttggtgctgacgatggttttatggcgggcctggtatatagctttcttgaaggatacagtttccgcgacagcgcccgttttgcggtagcctgcgcggcaattagccgcgccagcggcagcttaaacaaccctaccctgtctgccgataacgcgcttagtttagtgccaatggtgtaacaatgttgccggatgcgacgcttaacgcgtcttatccggcctacaaatcaggcaatttcagcaagtaaatgtaggcctgataagcttgcgcatcaggcaatgacactcaagctaaaccaataaagaacccggcaatggtcgcactcatcaagttggaaagcgtcgccgccgccagcgcccgtaaaccaagctgggcgatttccggcgcacggtgtggcgcaaccgcagaaaacgcccccaccaccaccccgatagaaccaaagttagcgaaaccgcacaacgcgaaggaaataatcgccacagttttagcatcgagagtgccagccgtttgcagatagggactgaaattgagataagcgacaaattcatttattgccagtttctgtccaatcaaactcccggcaagattcgcatcactccagtccacacccatcacccacgccagtggagccagcaggtaacctaaaatggactccaggctggcatgttcaaaaccaaaccagccaccaacgccgccgataataccgttaatcaacgcaattattgcaacaaatgccatcaccactgttgccacacctgcggcgattttcagcccggtcattgcccctgtcgcagcggcttcaataatgctttttggcggtgtttcggtgaaagagaggttattaaaggaaacctggctagattccgttgccgggcttaacaggcgggcaaacaagatcccgccagggatcgccattaaacttgccgccagcagatattccacaggcacgcccagtgcggcgtaaccaatcattgtgctaccagcaatgctggccatgccactacaaatcgctgtaaataattcattgcgattcagacgatcgataaagggtttgacgattgccggaatttcgttttgcccgaggaaaatggtggtgaccgcgacgaaactctcgatcttgctgatatttaatgctttctggaagataccgccgagaattcgaattaaaatccccatcacaccgatgtagtagagaatactcaccagcgcggtgacgaagataattgccggtaacaccctgaaaccaaagataaatcctgcaccatcaaataaggtatccattttcggtccgaccagagaaccgaagataaatgcgctacccgcgtcgctgtacgccatcactttatgcacgccaaaagcgactttttcagcgacccaacgccctggcggtaaccaaagcataatgccgccaatcacgacctgtaacactaacgccgcgccaacggtacgcaggctgatcttcttcttgtttacactcagtaaaaacgcaatcgtcagcaataccaccattcccagaacacttctcatgacatccatagtgattatctcttcatgtcatattgggcgacggctttctgcccatcagaaatagccaggcctgcatcttgcgataccggcccggcttgttatcaacacttaatgggttttgatgtagccgcgcacgcactcttcgactaatccccagaaccagtctgtatcaatagtgatgccgactttggtattggcgggcttgccaagaacgcccagctcgtcgcagacggtacgcccatagcaagggccactgttgacgtccacttcgacgtacatctcctgggttttaatgccatcagggttaatcagataaccgatgcaggtggcgtcgtgcaccgggccgccagcaaggccgtagttttcgaactgcgttttgagagtgaagttcatgatgtcgctgaacagctctccggcggggccgcctgccctttccatccgagcaatcacgtccggggtgcaaacggtctggttggtgagatcgaggcccatcatcactaatggaacgccggaggtgaacactacgcgtgcggcttccgggtcggcaaagatgttgaactcggcagatggcgtgaagttgcctgtaccgtaagcgccgcccattagcacaatttcacggattttgggcaggatcgcgggttgcatacgcattgccaccgcgatattactaagcggaccaaccggcaccagagtgatatcgccatcgcttgccatcagggtatcaatgatatatttcaccgcatgagtgctttctgcctggcgggtcagcggctcgaataccgggccatccagtccggtttcaccgtgaatattatcggcaacgatttgttgacgcataatgggctgcggcatccccgcataaaccggaacattaatctccagtttctggcaaacattcaggccattaattaatgttttatcaagcgtctgattacccgctacaatagtgatgcctaataaatctattgccggatgtttcgccgccatcattatagcaatagcatcatcatgacccggatcacaatccagaataatttttctcttttccattgtttatttcctctgtttccagttgcgttattttttctacagcaaagaaaattcgaccgggccgatgattgaatcttaacaacagcgtacgtatgctaaatatgagaaatctcatagcggataaacatcgtgaaagaaatccacaataatgatcttaagcagcaattgatgagtgaatccgcgtttaaggattgctttttaacggatgttagtgccgatacgcggctgtttcattttttagcgcgtgactacattgtgcaggaagggcaacagccgtcctggctgttttacctgacgcgaggccgcgccaggctttacgccacgctagctaatggtcgcgtgagcctgatcgatttctttgccgccccctgttttattggcgagattgagttaatcgataaagaccatgaaccgcgtgcggtgcaggctattgaagagtgttggtgccttgcgctccctatgaaacattaccgtccgctgttattaaacgacacgctatttttacgaaaactctgcgtcaccttaagtcataaaaattatcgtaatattgtttctttaactcagaatcaaagttttccgttagtgaatcgcctggcagcatttatattactcagccaggaaggtgatctttatcacgaaaagcatacgcaagcggcagagtatttaggcgtttcttatcgacatcttttatatgttctcgcgcagttcattcacgacggtttattaattaaaagcaagaaagggtatctcattaaaaacagaaagcagttgagtggactggcgctggagatggacccggagaataaattctccgggatgatgcagtaaaaattattttcaatagcgcgattgccggatgcaacgcttaatacgttttatccggtctacaaatcgagcattacgccagaccaataaagaacccggcaatagtcgcactcatcaggttggaaagcgttgctgctgccagcgcccgtaaaccaagctgggcgatttccggcgcgcgttttgggctaatagcgctaaatgcgccaacgacaacaccgatagaaccaaagttagcaaaaccacaaagcgcaaaggagataatcgcaatggttttcacttccagcgtgccgcccgtttgcaggtatggggagaaactcaggtaagcgacgaattcgttaatcgccagtttctgcccaatcaggctacccgcaagattggcatcactccagtccacacccatgatccacgccagcggtgccagcacatagccaaaaatactttccagagaggcattggcgaaaccaaaccagccgccaattccgccgataatgccgttgatcagcgcaataattgcgacaaacgccattaccaccgtcgccacaccagcggcgatttttagcccggtcatcgcaccgctcgccgccgcttcgataaagctttttggcggcgtttcgctgaagctcagattttcaaatgtgacctggctaggctcggttgccgggctaagaatacgtgcaaacaaaatcccgccagggatcgccatcaggcttgccgctaacaggtagtcaattggtacgcccattccggcataaccaatcatcatgctaccagcaatggacgccatcccgctacaaattgcggtaaacaactcgttgcgattcatgcgatcgataaacggtttaacgatcgccgggatctcattttgcccgaggaaaatagtagtaaccgcaacaaaagattcgattttgctgatgttgagggctttctggaaaatgctgccaaggatgcgaatcagcagccccatcacgccaatgtagtacagcagactgatgagcgcagtaacgaaaataatcgccggaagtacgcgaaaggcgaagataaaacccgcaccgtcaaacaggacatccattttcggcccaaccaggctaccaaaaatgaaggcgctaccggcatcactgtaagacatcactttatgaacgcctaatgccgcctgttctactgcccattttcccggtgggaagtagagcatgatgccaccaatagcgatttgcagcagcagtgcggctccaaccgtgcgcaaactgatgctctttttattcacactcaacagaaatgctattgccagtaacaccaccatccccacaacacttctcattatatccataatgattttcccttcatgccggtaaacccggcgtcagcgccaggttttggtatgcttgatgagtacgggcgacggctttctgcccgtcagaaattaacccgcgagacgctgatattctttggcaatttcgctcgccagaatggcgttgttgaacaccagctggatgttggatttcaggctgtcaccgccggtcagttcagcaacgcgcgccagcaggaatggcgtactttctttaccaatgactccctgagcttcagcttcagctaccgcctgatcgatcgccgcattgatagtgtgttccggcatagcaaactgttccgggatcgggttcgctaccacgaggccaccgttcagaccgctttgccatttcaccaccattgcacgggcaatttcgctggcgctgtcgagacgaatgctgacgtcaaacgggctggtgcggcagaaaaacgcaggcagcgctttagtctgatagccaattaacggcacaccgaaggtttctaaatactcagtggttaatcctaaatcgagaatagatttcgccccggcacaaacaacggtgacattagtatttgccagttcttgcaaatcggcagaaatatcgaaggtatgttccgccccgcgatgcacaccaccaattcccccggtggcaaatactttaattccggcaagcgccgcaataatcatcgtactagccacagtggttgcgccattttttccggcggcaacaacaaaaggtaaatcgcgacgactaactttggtcacgttatgcccttcacgacccagtaattcaatttcttctttgcttaaccccactttcatcacgccgccaataatggcgatcgtggcaggtacagcgccctgtttacgaatagtttcttcaacttcaattgcggtctgggcattttgtgggaacggcatcccgtgagaaataatggtgctttccagcgccacaaccggttttttgttttttaaagcgtcctgcacttccggggaaatttgtaataattcaggggaaatttttaattcagacattctgcgttctccactaagcttataacgttggcaatgcttaaatcggggttattggtgtattcacaggagagcgccatactgctacatccctgtgcgaaacgaacagattcggcaaacggcattccgtctacccaacagctagcaagtcccgccatcatggcatcgcccgctccggtaacattaataacattggttttgatcggcgcagaccagccactttcaccgctgatatcgctgtaataaacgccgtcgccgcccatgctcaataccagtcggttcaggccatgttgatggaaccaggcagcaacttttgccacatcttcacgcccactcagcgcaatcccactcagggtttccgcttcaaggcggtttggcttgagagtgtggatctgatttagacggtcgcgcactttgacacatttccatgcgctaaccggatcgacaaatacgggtacgttggcggcattatccagaatccatgccagtgcctcttcactgatattacagtccgcgacaatgacctttgccctctgaataaattcaccgtgctgtgcgagatattcagctgtaatagcgttgctaatattcatgtcatttatagcaaccagcatttcaccggtattatcgagtaaacttaaataactgctcgtattttctcccggcacaatcaggcatttatcgacataaacgccagattgattggtttgcgttagcaggctttgaccataaaaatcactgcctacggcgctcagtagccaggctttgttacccagcaacgccaggttttgtgcaatattgcgccctactccaccaggcgtaaattttattttacctggattactatccgcataatttaaactttcatgactatatccggcgacatcaatattcgcgctacctataattacgacataatccttttcgcgcatagcacgtcctctggtaaaaaattaccaaccctgtcaatccacaagaatatagatactgcaaagacggtttaaacatgtgttcatatttaaacatgtgctcatagtatgcatgttttacgtaaagtaaattaccgccagagaggcaaaatgggcagatttgagcaggctcacaaaatgcgattaaatgcctgaattacaaaagcgaggaatttgtgacgggatgcacagaacagaacaataaaaaagggcagaaaataatctgcccttgaggaaataacctgagtgtttgatgaacgtttgaagtttctactgaaagataaaaccatttaaattcataaaattacattcacaaaccggtcattctctttgcgctcatcaaatgttacaggacaggaaatttctgccctgtaacacaccttttattacgctgctttcgctactgcgtccacttccggacgtttcaggaaggcataggccaaacccgccaccagcgtaccggcaataattgctaccaggtaacccaataccggcgtaatagcgccagggatcagcagaacaaacagaccaccgtgcggtgccatcagtttcgcaccaatcgccatactgattgcgccagtcagcgccccacccacgatacagcacggcagcacacgcatcggatcacgagcagcaaacggaattgcaccttcgctaatgaagcacagtcccaataccagagcggctttgccaccttcctgctgcgctttgtcgaatttgcgacgcgccaccattgttgccagacccattgccagcggtggcaccatacctgccgccataatcgccgccatcgggccataggtttgagtactcagcagacccacaccgaatgcgtacgctgctttgtttaccggaccgcccatgtcagtacacatcatgccaccgaggatcgcccccagcagaaccgcattcgcagtccccatggtctgcagccagtgagtcagcccttcgagaatgccagcaactggtttaccgatcaggtagatcatcgccagaccgaccaccagactggaaattagcggaatgatcaggatcggtttcagcgcctccatactctgtggcagtttcaattgcgtactgattaacttcgcaatgtaaccagccaggaagcccgcaataataccaccaatgaagccagaaccggtgctgaccgccagcataccgccaatcagacccggagtgaggcccggacgatcggcaatggaaaaggcaatataacctgccagtaccggcaccatcagcgcaaaggcactaccaccaccaatctgcatcagcgccgcagccaacgtacccggctctttaaacgcttcgataccaaaagcaaaagaaagcgcgatacacagaccacctgcaacgaccatcggcagcatgtaagaaacgcccgtcagcaagtgacggtatgcgcctgcactctctttcttactttcagtggtcgccgtttgagctttgcccgccggttcatacggcgttgcttcagcaaccgctttatccagttcctgcgcggttttcttcagcgccagaccggtagaggtacgatacatcggtttaccagcaaatttcgccagatccacttcgatatctgccgccacaatcaccagatccgctgctgcgacttcttcgggagtgattgcattacccgcgccaacagaaccacgggtttcaactttcacccaccagccacgttttttcgcttcggtttcaatggcttcagccgccataaaggtgtgtgctacgccagtcgggcaagcagtcaccgcaactacgcgtttcggaccgctggcggcaactggtgctgtcgcagcgaccggcgcagtgtaaggtttcgcatggcctttggcttcactcaggaacagctcagggtgcgcaactgcccgggaaatatcgcccagccagacatttttaccgttcagcgcgctgtcgttcgggatggaatcaccgagaacaatcgccatttcagcgtcgttcggattgtcgatgatttccagttttgcttttcgcgccgccgcgcccagcagggtcttcgccatataggcgcgtgcctgaccgagattagcgtcaataatcagcagcgttttcattatgcctctcctgctgtcagttaaaaggttgtaagtcgacgcgcgccatcattgcggccaactgcggacgatcggtaatacccacattgctttgacttaccgccagggctgcaacagctgtcgccagacgcagtgtgtgttcactggattcacgcatcagcaagccataaatcaggccaccaaccatagaatcccctgcgccaacggtgcttacgacatcgacactcggtggtttggcgatccattcgccggaggcattaacccaaagcgcgccttcggcacccagactaataacaacatgcgcgatgccttgttcacgtagcgcatgtgcagcttcaatcacatctttcatttcaggcagtttacggcctgcccagatttccagctcgcggcggttaggtttcaccagccacggtgccgctttcaaacctgctactaacgcttcacggctactatcaaagataatgcaaggacactgactacgcaggcgagtcatccagtcggtgaacgcttccgggctgacgccactcggtaagcttccgctgacacagaccatatcgaactgaccgagccagctcagagaatcagtcacaaagcgttcccagtcggcgggggtgacttcaaaaccgctgaagttgaagtcggtcacttcgccgtctttttccgtcagcttaacgttaattcgggtgcgcccctgtacaacctggaaacggttggcaatgcccagctcgctgaacagttgctgaaaaccatcctgattgtctttacccaggaagccgccaacggtgacatcaattcccaggtcttttaatactttggccacgttgatgcctttacccgccgcatgcagaccggtggttttcaccaggttcacttcgccgcgttcaatttccgggcagaaaccaacaaggtcataagccggattaagggtgatagtagcaacacgtctgctcattatgcgccctccccaagaccagcagcgatagcgtcgccgattgctttcagcgcctgttcagcatctgcaccctgggcggtaaagcgtaggcgatgacctttcttaacgccaagtgccacaactttcatcagactacgtccgtttgccggtttgccggtaccatcaaggtttgtcacggtaatatcactgttaaattgtttaatggtattgaccagcatggtacctggacgagcatgcaggccgtgttcattgcgcaccacaaactccgcgcttaacacgtcgtcggtcggcgcatcatcgctggtcagcagcgccagcaacgttgccgcatccgctttcagcaagcggtcagctttattgtcgagcaataaatcagcgagacgcttaagaaccgcgatgggctgatcgtcattcatcgccacactcaccagcatggctgccgtttcgccgtccacatcaaaagcatttgccgcacggcttaccgcaatcgcgctacgcagattgccttcggcgctatcgctcagccagataccctgtccgagattcagcggttgttcattgatggctttggtgacgaaagtggcgtcaactgcccccgcctctttcagacgcgcagcgttcagcgcctgaagagtcagcagatcgctggcgacgatatccagtgtcagcatttcgttgtcgagcttcagctgctcactctgcttttcgcccatcagtaatgcgcgaagttcttctgctgttgttgcactcttcagttgttcagcaacggaatcatcgctcagtacgtgggtcagctggcgtagcaggcccagatgttcatcgctgctggcagcaataccgattgccacgtacgctacctgaccgtcaccccaggtgacgccttccgggaactgaaatacctgaacgccggttttcagcacctgatcgcgggtgtcggtagtgccgtgtggaatagcaataccattgccgaggaacgtactggtttgctgttcgcgcgccagcatgccattgacgtagccttctgctacattaccggcctgcaccagcgccgcagcgacctggcgaatcgcctcttctttgtctccggccttttcgcccggatggatgtcctgtacggataactggaacatagttctcctctcttgctgaattgaaacgattcagcctctatgagaaaaaaagcgccaacctggcttagggttaaagacaagatcgcgctgaaacgtttcaagaaagcataatacttctgtttcagcacgcaaggaaagccgtaaagttatgagcaaaagtttgatgtgctgcacaattttttgccatttttcctaattgctgatgggaaaatccgttatcagcaatttcatttcagcagcgtcagcagccaatcagcaacagtgaaatggcattttgactattcgtggcgcttttgatttcgctgtctgtttattttctgacaagcagcgtaaactccgcgtcttcctcttccagtgatcgaccagcatgcataactcccccgcagtctccagcgcgaaaagctttgacctgaccagcacggcgtttttaatcgttgcctttctcaccggtattgcgggcgctctgcaaaccccgacactcagtatttttcttaccgatgaagtacatgcccgtccggcgatggtgggattcttctttaccggcagcgctgtcattgggattctggtaagtcagtttctcgccgggcgctctgataagcgcggcgatcgcaaaagcctgattgtcttttgctgcctgttaggcgtgctggcctgcaccctttttgcctggaatcgcaactactttgttttgctattcgttggcgtctttcttagcagctttggcagcaccgctaacccgcaaatgtttgcccttgcccgtgaacatgccgacaaaaccggacgtgaggcggtgatgttcagctcttttttacgcgctcaggttagtctggcatgggtcattggcccaccgctggcttatgccttagcgatgggtttcagctttacggtaatgtatctgagcgcagcggtagcgtttattgtttgcggtgtgatggtgtggctgtttttaccgagcatgcgaaaagagcttccgctggcgaccggcacgatcgaagcgccgcgccgtaaccgtcgcgatacgctgctgctgtttgtcatttgtacattgatgtggggcagcaacagcctgtacatcatcaacatgccgctatttattatcaacgaactgcatcttcccgagaaactggccggtgtgatgatggggaccgccgccgggctggaaatcccgacgatgttgattgccggatatttcgccaaacgtctgggtaagcgtttcttaatgcgcgttgctgccgtgggtggcgtctgtttttacgcaggaatgctgatggcgcatagtcctgtcattctgttgggcttgcagctgctaaatgctatttttattggcattctgggcggcatcgggatgctctattttcaggatctgatgcccggtcaggcgggtagtgccaccacgctctataccaacactagccgcgtgggctggatcatcgcaggaagtgtggcgggcatcgtcgccgagatctggaattatcacgctgtgttctggtttgcgatggtgatgattatcgccactctgttttgcttactgcggattaaagatgtttaaggcgcggtcagcatttccagatcgataagccaggtcatggcctgctgacggctgttaccgcacatttcagcgctggcttgtaagcctgcacagactttcggtcgcagtgggctggtgaaaattttacagcgttgctgttcatcaagctgaatgcagggcgtattggcgggcttgccatctggcataccgggaatagggctggaaatactaggggcagtgcaacacgccccgcaacccggacggcattccatacgttgttctcttaaggttaaccaccggattgatgagcgcgcacagtaccaccttttttgcaccagcaaaagtgcgaataccacttgcccgaaaggcccgtcgcgagtactttgtcgcgatatttttgacattttcgactacaggaatttttcgatgccaagagcgaacgaaattaaaaaaggtatggtactgaattacaacggcaaactgctgctggttaaggatattgatattcagagccccactgcccgcggtgccgctacgctgtacaaaatgcgtttttctgatgtccgtaccgggctgaaagtagaagagcgtttcaaaggtgatgatatcgttgacaccgtgacgctgacccgccgttacgttgacttctcctatgtcgatggcaacgaatatgtctttatggataaagaagactataccccgtataccttcaccaaagatcagattgaagaagagttgctgtttatgccagagggcggcatgccggacatgcaggtgctgacctgggacggtcaactgctggcgcttgagctgccgcagaccgttgatctggaaatcgttgaaaccgcaccaggcatcaaaggggcatctgccagcgcccgtaacaaaccggcgacattgagcactggtctggtgattcaggtaccagaatacttaagcccgggcgaaaaaattcgtatccatatcgaagaacgccgttatatggggcgtgctgactaacttcagccgcatgcagaaaagggatagctcaggctgtcccttttttaatttattataccaatcttctattttgcgcttcctgaacaccttacgccctcaattttcactcgttgattgatcgccctcacacttcatcgcattaacaatccagaccaatttcaattgctgtcatataactttacactgtcgttgttaattaatcgttactaagacgtgactcctatgaatacaatcgcctccgttacgctcccgcatcatgtacacgctccacgctatgatcgccagcagttgcaaagtcgtatcgttcattttggctttggagcctttcaccgcgctcatcaggcgttactgaccgatcgtgtgctgaatgcccagggcggcgactgggggatctgtgaaatcagcttgttcagcggtgatcaactgatgagccagctccgcgcacagaaccatttatataccgtgctggagaaaggtgcggacggcaatcaggtgataattgtcggtgccgttcacgaatgccttaatgcaaaactggattccttagcggcaattattgagaaattttgcgagccacaggtggcaattgtttccctgacgattaccgaaaaaggctattgtattgacccggccaccggtgcactcgacaccagtaatccgcggattattcacgatctacaaacccctgaagaacctcactccgcaccgggtattctcgtcgaagcactgaaacgccgccgtgagcgcggccttacaccgtttaccgtgctctcctgcgacaatattcccgacaatggtcatgtggtgaaaaacgcggtgctgggaatggcagaaaaacgtagcccagaactcgccgggtggataaaagagcacgtcagttttccgggaaccatggtcgaccgcattgttccggctgcaaccgacgaaagtctggtggaaatcagccagcatctgggggtgaatgatccctgcgcgattagctgcgaaccgtttatccagtgggtggtggaagataacttcgtcgctgggcgtcctgcctgggaagtcgcaggtgtacaaatggtgaatgatgtcctgccatgggaagagatgaaactgcggatgcttaatggcagccactcttttctcgcttatctgggttacctcagtggattcgcccatatcagtgattgcatgcaggatcgcgcatttcgccatgccgccagaacattaatgctggatgagcaagcgccgacactgcaaattaaagatgtcgatttaacacaatatgcggataagttaattgcacgttttgctaatccggcgctgaaacataagacctggcaaatcgcgatggatggcagccagaaattaccgcaacgcatgctggcaggtattcgcatacatcaggggcgcgaaacggactggagcttgctggcattaggcgttgcaggctggatgcgttacgtcagcggcgttgatgatgccggaaatgccattgatgttcgcgatccgcttagcgataaaattcgcgaacttgttgcgggcagcagcagtgaacaacgcgtaaccgccctgctttccctgcgtgaagttttcggtgatgatctgccagataacccgcattttgtgcaggccatcgaacaagcctggcaacaaatcgtacaattcggcgcacatcaggcgctattaaacaccctcaaaatttaacgatttctgcggttaaagcggatgaagctcaccttcgtccgctctccccttctcttttctgccttttttagccaggattaacgctcagttaacttaccagagtattgcggagccgttgtgaccaggaccaacctcatcaccggttttctcggcagcgggaaaaccacgagcattcttcatctgttagcccataaagatcccaacgaaaaatgggcggtactggttaatgaatttggggaagtcggaattgatggtgctttgctcgccgatagcggcgcattgctgaaagagatccccggcggctgcatgtgctgcgttaatggtttacccatgcaggtagggttgaataccttactgcgtcagggaaaaccagaccgcttgttgatagagccgaccgggctgggccatccgaaacagatcctcgatctgttaaccgcaccagtctatgaaccgtggatagatctgcgcgccaccttgtgcattctcgatccgcgcttgctgctggacgaaaaaagcgccagcaatgaaaacttccgtgaccagctggctgccgcagacatcattgtcgccaataaatccgaccgtacgacgcccgaaagtgagcaagcgctacagcgttggtggcagcaaaatggtggcgatcgacaattaattcacagtgagcatgggaaagttgacggtcatcttctggatttgccgcgtcgcaatttagccgagttgcccgccagcgccgcgcattctcatcagcatgtcgtgaaaaaagggttagcagcgttaagcctgccagagcatcaacgctggcgtcgcagtctgaacagcgggcaaggatatcaggcctgcggctggatattcgacgctgatacggtattcgacaccattggcattctggaatgggcgcgacttgcaccggtggaacgcgtcaaaggcgtgctgcgtattcccgaagggctggtgcgaatcaaccgtcagggcgatgacctgcacattgaaacgcaaaacgttgcgccaccggacagccgtattgagctgatttccagcagcgaagctgactggaatgccttgcagagcgcgctgttgaagcttcgtttagcgactaccgcgtaaggttgcctgcgtttttcagtaagataattagagaaaatatgattaaaaatttgccgcaaatagtgttgttgaatattgtcggcctcgcgctgtttctttcctggtatatccccgttaatcatggattctggttgccgattgatgcggatattttttatttctttaatcagaaactggtcgaaagtaaggcctttttgtggctggttgcattgaccaacaatcgcgccttcgacggttgtagtctgctggcgatgggtatgttgatgctgagtttctggctgaaagaaaacgcccctggcagacgacgtatcgtgattattggtctggtcatgctattaactgcagtggtattaaaccagctgggtcaggcattaattcctgtaaaacgggccagcccaacattgacttttaccgatattaaccgcgtcagcgaactgctctctgttcccacgaaagatgccagtcgagatagctttcccggcgatcacggcatgatgctgcttatttttagcgcattcatgtggcgttatttcggcaaagttgcaggccttatcgcccttattatttttgtggtttttgcatttcccagagtaatgattggcgcacactggtttactgacatcattgtcggtagcatgaccgtgatattgatcggtttgccctgggtgttgctgacgccattaagtgatcgattaatcaccttttttgacaaaagtctaccaggaaaaaacaaacatttccaaaacaaataactcacagtaattaacatcatcagggttatttttatagtgaggataatcctgatgatgcgcaccgtgctttcatctatcgaacgcaaaaatcattctctaagtaaatgaatggattgcatgcgtttcactcaattgtactttaattgaccaaccccgcttattaactttctgtatcactttttcttataaaaaatcatgtaaaaccgctcgccaagaccgcaccaatcgggtaatctcgaactcgttttgcctcggcggtagattatcctcacagcatataattttgtgcgttagtccacagatttggccttaaggaattgtttcaacatgcccaggtaattagtctcgtgtcgcttggcatttttttataacgatatttgtcgttaaggacttcaagggaaaacaaacaacatggtcaaatctcaaccgattttgagatatatcttgcgcgggattcccgcgattgcagtagcggttctgctttctgcatgtagtgcaaataacaccgcaaagaatatgcatcctgagacacgtgcagtgggtagtgaaacaagtagtctgcaagcttctcaggatgaatttgaaaacctggttcgtaatgtcgacgtaaaaagccgaattatggatcagtatgctgactggaaaggcgtacgttatcgtctgggcggcagcactaaaaaaggtatcgattgttctggtttcgtacagcgtacattccgtgagcaatttggcttagaacttccgcgtagcacttacgaacagcaggaaatgggtaaatctgtttcccgcagtaatttgcgtacgggtgatttagttctgttccgtgccggtagtacgggacgccatgtcggtatttatatcggcaacaatcagtttgtccatgcttccaccagcagtggtgttattatttccagcatgaatgaaccgtactggaagaagcgttacaacgaagcacgccgggttctcagccgcagctaataaaccgtttggatgcaatcccttggctatcctgacgagttaactgaaagcactgcttaggcagtgcttttttgttttcattcatcagagaaaatgatgtttccgcgtcttgatccaggctatagtccggtcattgttatcttttaaatgttgtcgtaatttcaggaaattaacggaatcatgttcatacgcgctcccaattttggacgtaagctcctgcttacctgcattgttgcaggcgtaatgattgcgatactggtgagttgccttcagtttttagtggcctggcataagcacgaagtcaaatacgacacactgattaccgacgtacaaaagtatctcgatacctattttgccgacctgaaatccactactgaccggctccagccgctgaccttagatacctgccagcaagctaaccccgaactgaccgcccgcgcagcgtttagcatgaatgtccgaacgtttgtgctggtgaaagataaaaaaacattctgtagttctgcgaccggtgagatggacattccactcaatgaattgattccggcgctcgacattaataaaaacgtcgatatggcgatcttacccggcacgccgatggtgccgaacaaacccgcaatcgtcatctggtatcgcaaccctttgctgaaaaatagcggcgtctttgccgctctgaatctcaacctgacgcctagtctcttttatagtagtcggcaggaagattacgatggcgtcgccctcattattggcaatactgcgctatctaccttttctagtcgtttgatgaacgttaacgaattaaccgacatgccagtccgtgaaactaaaattgcgggcattcctctgaccgttcggctttatgcagatgactggacatggaacgatgtgtggtacgcatttttactgggcggcatgagtggaactgtcgttggcctgctctgctattacctgatgagcgtacgtatgcgccccggcagagaaatcatgaccgccatcaagcgcgaacaattttacgtggcgtatcaaccggtggtggatacacaagctttgcgagtaacgggcctggaagtactgctacgctggcggcatcctgtcgcgggagaaattcccccggatgccttcattaactttgccgaaagccaaaagatgattgtgccgctgactcagcacctgtttgagttaattgcccgcgatgccgcagaattagaaaaagtgctgccggtaggcgtcaaatttggtattaacattgcgccggaccatctgcacagcgaaagctttaaagcagatatccagaaactgctcacttccctgcccgcacaccatttccagattgtgctggaaattaccgagcgcgatatgttgaaagagcaagaagccacacaactcttcgcctggctgcacagcgtcggcgtagaaattgctattgatgacttcggcaccgggcacagcgcgcttatctatcttgagcgttttacgctcgattatctgaaaattgaccgtggatttatcaacgccatcggtacggaaacgatcacttcccccgtacttgacgcggtgctgacgctggcgaaacgcctcaatatgctgacggttgctgaaggggtcgaaacgccggaacaggcgcgatggctaagcgaacgcggcgttaatttcatgcaaggctactggattagccgcccgttaccgctggacgattttgttcgctggctaaagaaaccgtatacgccgcagtggtaaggtgtgcttacgtcccttattattcatagtgaaagcatgccggattgcggctaatgatgagtaaaaggaaatccgttgcagatgattgtgcgcatactgctgctgtttatcgctctgttcacctttggtgtgcaggcgcaggctatcaaggaaagctatgcctttgccgtgctgggcgaaccccggtacgcgtttaatttcaaccattttgattatgtgaaccccgccgcgccaaaaggtgggcagataacgttgagtgccctcggcaccttcgataatttcaaccgctatgcactgcgcggcaacccgggcgcacgcaccgagcagctgtacgacacgctatttacgacttccgatgacgaaccaggcagttattacccgctgattgctgaaagcgcacgctatgctgacgattattcctgggtggaggtcgctattaatccgcgcgcccgttttcatgatggtagccccattactgcccgcgatgtagagtttacttttcaaaaatttatgaccgaaggcgtgccgcaatttcgtctggtctacaaaggcaccaccgtcaaagccattgcaccgttaaccgtgcgcattgagttagctaaacccggcaaagaagatatgctgagtctgtttagcctgccggtatttccagaaaagtactggaaggatcacaaacttagcgacccgctcgccacgcctccgcttgccagtggtccgtaccgcgttacgtcctggaaaatggggcaaaatattgtctattcccgtgtgaaagattactgggcagcaaacttaccggtaaaccgtggacgctggaatttcgacaccattcgctacgattattacctcgatgataatgtcgcctttgaagcgtttaaagcaggtgcctttgatttgcgtatggaaaacgacgccaaaaactgggccacgcgttataccggtaaaaatttcgataaaaaatacatcatcaaagatgagcaaaagaacgaaagtgcccaggatacgcgttggctggcgtttaatatccaacgtccggtattcagcgatcgccgggtccgggaagctatcactctcgcctttgactttgaatggatgaacaaggcgttgttttacaatgcctggagtcgcacgaacagttattttcagaataccgaatacgcggccagaaattaccccgacgccgcggagctggtgcttctggcaccaatgaaaaaagatctaccgagtgaagtcttcacacaaatctaccagccgccggtatccaaaggcgatggctacgatcgtgacaacctgttaaaagccgacaaacttctcaacgaagcgggctgggtgctgaagggtcagcaacgcgttaatgccacaacgggtcagccactcagctttgaattattgcttcccgcaagcagcaatagtcagtgggtattgccgttccagcacagcctgcaacggctgggtatcaacatggacattcgcaaggtggataacagccaaatcactaaccgcatgcgcagtcgcgactatgacatgatgccgcgcgtatggcgggcgatgccgtggcccagttccgatttacagatttcctggagtagcgaatatatcaattccacttataatgcccccggcgtgcaaagcccggttatcgacagcctgatcaaccaaattattgccgcgcagggaaataaagaaaaattactgccgttggggcgagcactggatcgcgtattaacgtggaattattacatgctgccaatgtggtacatggcggaagaccgtctcgcctggtgggataaattctcccagccggccgtgcgccccatctatagcctcggtatcgatacctggtggtatgacgtcaataaagcggccaaactgccgtccgccagcaaacagggagagtaaatgggcgcttacctgattcgccgtctgttgctggtgatcccaacattatgggcgattatcaccatcaactttttcatcgtgcaaattgcgcctggcggtccggtcgaccaggccatcgccgccattgagtttggtaatgccggagtattacccggcgcaggcggtgaaggtgttcgtgccagccatgcgcaaacgggtgtcggcaatatcagcgacagtaattaccgtggcggacgcggattagatccagaagtgatcgctgagatcactcatcgctacggttttgataagccgatccacgaacgttacttcaaaatgctctgggactacatccgctttgattttggcgatagcctgtttcgcagcgccagcgtgctgacgctgattaaagacagtctgccggtttccatcaccctcggattgtggagcacgctgattatctatctggtgagcattccgttaggcattcgcaaagctgtttataatgggagccgctttgacgtctggagtagcgcatttatcatcatcggctacgccattccggcctttttgtttgccatcctgctgattgtcttcttcgcgggcggcagctatttcgacctgttccctctacgcggcctggtttccgctaactttgatagcctgccgtggtatcagaaaatcaccgattatctgtggcatatcacgctgccggtgctggcgacagtgattggtggctttgcggcgctgaccatgctgacaaaaaacagtttccttgatgaagtgcgcaagcaatacgtggtgaccgcgcgtgcgaaaggggtaagtgaaaaaaatattctctggaaacatgtgttccgcaacgccatgctgctggtgattgccggttttccggcgacgtttatcagcatgttttttaccggcagcctgctgattgaggtgatgtttagtctcaatggtctgggcttactgggctacgaagcgaccgtcagccgcgattatcctgtaatgtttggtaccttgtatattttcaccctgattggcctgctgctgaatattgtcagtgatatcagctatacgctggttgatccgcgtattgattttgagggacgttaatgagccgactcagccccgtcaatcaggcccgttgggcgcgttttcgtcataaccgtcgcggctactggagcttatggattttcctcgtcttgtttggtttgagtttgtgttctgaacttatcgccaacgataaaccgttgctggtgcgttatgacggcagttggtatttcccgttattgaaaaactacagcgaaagcgattttggcggcccgctggcaagtcaggctgattatcaggacccgtggctgaaacaacggctggaaaataacggctgggtactgtgggcaccgattcgctttggtgctaccagtatcaactttgctaccaataagcccttcccttctccaccctcccggcaaaactggctgggaacggatgccaacggcggcgatgtgctggcacgcattctctatggcacgcggatcagcgttctgtttggcctgatgctgactctctgttccagcgtgatgggcgtgctggcgggggcgctacaaggctattacggcggtaaagtcgatctctggggacaacgctttattgaagtatggagcgggatgccgacgctgtttttgattattttactttccagcgtcgtacagcctaacttctggtggctgctggcaattactgtcttgtttggctggatgagtctggtcggcgtggtgcgggcggagtttttacgtactcgtaatttcgactacattcgtgcggcacaggcgcttggcgtcagcgatcgcagtatcatcctgcgtcatatgttgcctaatgccatggtcgcgaccctcacctttttaccgtttattttatgtagtagcataaccaccctgaccagcctcgatttcctcggcttcggtctaccgctcggtagtccgagtctcggtgaactgctgttacaagggaaaaataaccttcaggccccgtggcttgggatcaccgccttcttgagcgtggcgatattattgtctttgctgatctttattggtgaagccgtccgcgacgcatttgatcctaataaggcggtgtaacatgacgcaaactctgttagcgattgaaaatttgagcgtgggttttcgccatcagcaaaccgtacgtacagtagtcaatgatgttagtctacagattgaggctggcgaaacgctggcgctggtgggtgagagtggtagtggcaaaagcgttaccgcgctgagtattttacgcctgctcccttccccgccggttgaatatctctccggcgatattcgttttcatggcgaaagcctgcttcacgccagcgatcaaacgttgcgcggtgtacgcggtaataagatcgccatgatttttcaggaaccgatggtgagcttaaatccattgcataccctggaaaaacagctttatgaagtgcttagtctccaccgcgggatgcgtcgggaagcggctcgtggcgaaattcttaactgccttgatcgcgttggtatccgccaggcggcaaaacggctgacagattatccgcatcagctctccggcggcgaacggcagcgggtgatgattgcgatggcgctgttaacgcgaccggaattattaattgccgatgaaccgaccaccgcactggacgtctctgtccaggcgcagattttacagctgttgcgcgaactgcaaggcgagctgaatatgggcatgctgtttattactcataacctcagcattgtcagaaaactggcccaccgcgtggcggtaatgcaaaacggtcgctgtgtcgagcaaaattacgccgctacgctatttgcaagtcccactcatccttacacacaaaagctactcaacagtgaaccgagtggcgatccagtgccgttgccagaacctgccagtacgttgctggatgttgaacagcttcaggttgccttccccattcgcaaagggattttgaagcgcattgtggatcataatgtggtggtgaaaaacatcagttttacgctacgagcgggtgaaacactgggtttagtgggcgagtccggttccgggaaaagtacgacgggactggcgctgctgcgactgattaattctcagggcagcatcatctttgacggtcagccactgcaaaatttaaatcgccgccagctgttacctattcgtcatcgcattcaggtggtatttcaggatccaaactccagcctcaacccacgactcaacgttttgcagattattgaggaaggcttacgggttcaccagccgacgctttctgccgcacaacgcgaacaacaagtgatagccgtgatgcatgaagtgggattagatcctgaaacacgccaccgttatccggcggagttctctggtggtcagcgacaacgtattgcgattgccagggcattaattcttaagcccagcctgatcatacttgatgaaccgacaagtagtctcgacaaaacggtacaggcgcaaatattgacgctattgaaaagtttgcaacaaaagcatcaactggcctatttgtttatcagccacgatttgcacgttgtccgcgcgttatgtcatcaggttatcatactgcgacaaggggaagtagtggaacaaggaccgtgcgcgcgcgtgtttgccacaccgcagcaggagtatacgcgtcagctactggcgttgagctgacgcttaaaaaggattgtagttactaaagggttcggcaattgccacaccaaaatttttcaatcggcatgttgcagcaaactcgtcctggcgatttacaaacaggcacggctcaccttcacactccagcacgctacatggaacttcgatgtcgcttaacgcctggcttagtttatacatcacgctccatgcattatcaccatccgggctaagcaatttaagcgccaccaggctgttgtcaccgcacggtccattttgcggaatcggttcaaccttgctacctgcgaaaccagcagaccagcgatagttctgcggcagtcgatggacgatactgagttgtaaactagtcacttattttccccggaagcacattcacttcacaatttgtttacatcaattttaacacatcatcaacaatccgtctttatacagatcgtaaagattgatgcctcgcctgcgtggcctctatggctctgatttaagtaatatctgcgggcgtggtcacgtttgcggggctatatgtacccgtttctgcgatctaactcaacctttttaactacaatgatgtgactttttacataaattgattttacataaaataaacatatatcgggggaatgatagatttgtggttgacatgcatcaacaaaggaagccttttagcttcctcgttgtgcaatagatcaccgttttttcggccgactggcgtacagacagaagagaatggagctggttgcgcagaatgcaatactccaaatcatcggccatgcagagttaaaggtcgcaagagaaagcaatgcgccaacaattgcccctatgccaaaacggaaggttcctgccaggctagatgccgttcccgccatatggggaaactcatcaagaatgaccgccatcgcattggaactcaccatgctcacgcagcccacaaacgccgcaacgccaaccaccaggctccaaaatcccagccccagcagcgcactgatgaccatccacgctgccataataaattgtatccacaacccgctgcggaacatatttaacgcgccaatgcggcggacgaagcggctgttaaagatggtcatcacgaacagaaaaacaatgtttagcgcaaagtaataaccaaagttttccggcgcgacgtggttaatttcaatataaacaaacggtccggcgcttaagaaactgaacatcccggcaaagctgaaaccactggcaagcatgtagctcaggacacgtttatggcggaacagcgccgcaaagttaccaatagtggtacgaatgtgaaatggctgacgacgctccggtggtaaggtttctttaatcaggaagaaaatcattgcgctagccagaatcgccgctaatgccaggatccagaagatgtaatgccagctcagccacaccagcacccagccgccaactatcggtgccatcagcggtgcaatggttgtcaccagcatgacaaagctcatcatccggctgaactcttctttcgggtaaatatcgcgcatcagggcgttaatgaccacgctggccgcagccgcagccagcccgtggaagaaacgcatcacaatcagctgatcgatggtgtttgccaacgcacacgccaccgcggcggcggcaaacaccagcgtaccgccgagcaccaccggcttacgcccgaagctgtctgccatcggcccgtagattaactgccccaacgcaaagcccagaatataagtactgagggtcatctgcgtactgcccgccggtacgccaaactgcgcactaattaccggtagcgcgggcagatacatatcaatgctcagcggcatcaacatggccagcaggccaaggataaaaacaatagcaaagctgctatgctgtcgggtggtcacaacgggctcctgaaagtcattgaaaagttagacgacgctggcaatttcttcttcagttaacggacgatattcaccgggggctaaatcagcatccagcgtaataccgccaatacgttcacgatgcagctcaaccacgtggttacccacggcggcgaacatgcgtttcacctgatgataacgcccttcgctgatggtcagacgaacctgcgttggggtaatcacttccagcaccgcaggcttagtgagatctttttcgttatgcagctgcacgcctttagcaaattgctctgccgtatcgtcagctacaggactttccagtgtcaccagataggtcttctcgcaatgatggcgcggagaagtaatgcggtggctccactgaccatcatcagtcatcagcaccagaccggtggtatcaatatccaaccgccccgccgcatgcagtttccacgctaccggttcatcaagaaaatagagcaccgttgggtgatcagggtcgtccgtggagcaaacatagccctgaggcttattgagcatgaagtaacgtggaccgtgttgctgcgccagcgggttgccatcgtaagcgacatcatgttcaggaagcagtttgaacgctgcattacggacgatttcgccatcgacggtgacacgattgccgcggatttcacgcccggcaatagcacggctaacgccgagttgctgtgcgataaatttatcaagtcgcatgtgtgtgattttgcctgtaaaaacggaggtcgggcattgacccgaaaatctgaactgttgtctgcccagtatagcggtctaataacatccctcaagggaaaaagatccatggcatactattagcagaataatctacctacgcgagaccatgatttttacacttcgcccatatcagcaagaagccgtggatgccacgctcaaccattttcgtcgtcataaaacccctgccgttatcgtgctgcccaccggcgcaggtaaaagcctggtgatagcggaactggcacggctggctcgtggtcgcgtgctggtgctggcacacgttaaagaactggtggcgcaaaaccatgcaaagtatcaggcgctggggctggaagccgatatttttgccgccgggctaaagcgcaaagagagccacggtaaagtggtatttggcagcgtgcagtctgtcgcccgtaatcttgatgcctttcagggtgaatttagcctgttgattgtcgatgaatgtcaccgtattggtgacgatgaagagagccagtatcagcaaatcctcactcacctgacaaaagtgaatccccacttacgcctgctggggctgactgccacgccttttcgattgggcaaaggctggatctaccagtttcattatcacggcatggtacgcggcgatgagaaagcccttttccgtgactgcatttatgagctgccgctgcgttatatgattaaacacggctatctgacgccgccagaacgactggatatgccagtagtgcaatacgatttcagccgcttgcaggcacagagtaacgggctgttcagcgaagccgatctcaaccgtgagctgaaaaaacaacaacgtattaccccgcacatcatcagccagattatggagtttgctgcaacgcgcaaaggggtgatgatttttgccgcgacggttgaacacgcaaaagagattgtgggattactgcctgccgaagatgcagcactgattactggcgacacccccggcgctgagcgcgatgtgttaattgaaaattttaaagcccagcgttttcgctatctggtcaacgtcgcggtactgaccaccggatttgacgccccgcacgtcgatcttatcgccattctgcgccctaccgaaagtgtgagtctttaccaacaaattgtcgggcgcggtctgcgtctcgctccgggcaagactgattgcttaattcttgattatgcgggtaatcctcacgatctctacgcgccggaagttggtacaccaaaaggcaaaagtgacaacgttccggtacaggttttctgccctgcctgcggttttgccaacaccttttgggggaaaacgaccgccgacgggacattgattgaacactttggtcgtcgctgtcagggatggtttgaagatgacgacggtcatcgcgaacaatgtgacttccgtttccgttttaaaaattgcccgcaatgtaacgcggaaaacgatattgccgcccgccgctgccgcgaatgtgacaccgtactggttgatccggacgatatgttaaaagcggcgctacgactgaaagacgcgctggtattacgctgtagcggcatgtctttgcaacatgggcacgacgagaaaggcgaatggttgaaaatcacctattacgatgaagacggcgcggatgtgagtgagcgtttccgtctgcaaacacctgcccagcgtaccgccttcgagcagctttttatccgcccgcatacgcgcacaccgggcatcccgctgcgctggatcaccgccgccgatatcctcgcccagcaagccttattgcgacacccggattttgtcgtcgcccgcatgaaaggccagtactggcaggtgcgtgaaaaagtgttcgattacgaaggtcgttttcgtctggcgcacgaattacgcggttaatggtagttttgattgatgtataaggcgattgagtatagaatctcgcccgcttttgcatacgcaaagcagatcacttacctgttgctgggtcgcctgtagcaggattaatttaagagagaaagaaatgtttactatcaacgcagaagtacgtaaagagcagggtaagggtgcgagccgccgcctgcgtgccgctaacaagttcccggcaatcatctacggtggcaaagaagcgccgctggctatcgagctggatcacgacaaagtcatgaacatgcaagctaaagctgaattctacagcgaagttctgaccatcgttgttgacggtaaagaaatcaaagttaaagctcaggacgtacagcgtcacccgtacaaaccgaagctgcagcacatcgacttcgttcgcgcttaattgctgaataagttgtaaaaaaccccgctccggcggggttttttgtatctgcagattatgcctgattacggtattgctattttttgcaggccagataaggcgttcacgccgcatctggcattcagaacacaaaaccgattaattgccgccagacgtccggcgctgcaattggtcgcgcaaattcggcggcgtgcctttaatggtcaaggtatcggttgctggatcccagaagatgcgttcacctaacagcatcgcatcaaagttaatagtcaagccaccgccgctaccggcaaacttcgtcaactgacgcagtgtgctacggtctgccgggaagctctcttccagttcgtagcctttttcagccgcaaactccgtgaagctcacttcgcttacgcctgccagctctttgctcaggcttttcagttcgatctcttcgcctgcctgcagctgctcattacagtagctataaacctgctggcgcacgttctgtcgctctgctttatccagttgtgcttcggcagtgaaatcatcaaccgcttgcaacagcccacggttttgcgctttcgcgtttaacccttcgctggccccgaggaaatccataaagaaatccgccactttgcgccctactcgccctttcaggaaagtgagatagcgggtggactctggattggtttcccattcggttaaatcgatacgcgcaacaatatccgcatgattgatatcaagataatgggttgggttgatgtcgagattttcgttaacgcgcatactgctcaggttgctcagaactgccaccagcaaatactccaccgccagatagcgatagtggcaaaacagcacgaatccaccgtcagcaaaaggatatttcgctaattcgtcacgcaggcggccggttgccgcgcggctaaatgccaggaagtcctcttcgccctgacgctgtaagcgcagcgtctgcgccagttcactctcttcgctaaacaagccgtaagctttatttttggcgctatagacccgatgcagttctgccaccatctcaacgacggtttctgtcggttccagcaaactatcgcgcaacaccagctcaaggttctgctcatcacgcttgataagctggtgcagagcaatctggttgatatccagactcatgataaactctcctttaagaccgggcggtattcaaccaccgccggttaagcgacgcaataaaagatggcggtcattttacagaaggcagcgtaacgagaatgatttaacgcataaaaaagcagaaaaaaaaccgttgctacggtaatatgttgccctttcatcaactaactgatttcgatttatgccacaaatttcccgctacagtgatgaacaggttgaacaattgctcgcagagctgctcaacgtactggaaaaacataaggctccgaccgacctttccctgatggtgttaggcaacatggtcactaaccttatcaacaccagcattgccccggcccaacgccaggcaattgccaactcttttgcccgcgccttacagtcctctatcaacgaagacaaagcgcactaagggaaacagataacaggttatggtaactcatcgtcagcgctaccgtgaaaaagtctcccagatggtcagttgggggcactggtttgcactgttcaatattctgcttagcctcgtcattggcagccgttacctgtttatcgccgactggccgacaacgcttgctggtcgcatttattcctacgtaagcattatcggccatttcagcttcctggtgttcgccacctacttgctgatcctcttcccgctgacctttatcgtcggctcccagaggctgatgaggtttttgtccgtcattctggcaacggcgggaatgacgctattactgatcgatagcgaagtctttactcgtttccatctccatcttaatcccatcgtctggcaactggttatcaacccagacgaaaatgagatggcgcgcgactggcagctgatgttcatcagcgtgccggttattttattgcttgaactggtgtttgcgacgtggagctggcaaaagctgcgcagcctgacgcgtcgtcgacgcttcgcgcgcccgctggccgcattcttatttatcgcctttatcgccagccatgtggtgtatatctgggccgatgccaacttctatcgcccgatcaccatgcagcgcgctaacctgccgcttagctacccgatgacggcgcgacgttttcttgagaagcatggtctgcttgatgcgcaggagtatcaacgccgtcttattgagcaaggtaatccagacgccgtttccgttcagtatccgttaagcgaactgcgctatcgcgatatgggcaccgggcagaatgtgctgttgattactgtcgatggcctgaactacagtcgcttcgagaagcagatgcctgcgctggcaggttttgctgagcaaaatattagcttcacgcgccatatgagctccggcaacactacagacaacggcatctttggcctgttctatggcatcagcccgagctatatggacggcattctgagcacccgtacgcctgcggcattaattactgcgcttaatcagcaaggctatcagctggggttattcagtagtgatggctttaccagcccgctgtatcgccaggcattgttgagtgatttcagcatgccgagcgtacgcacccaatccgacgagcagaccgccacgcagtggatcaactggctgggacgctacgcacaagaagataaccgctggttcagctgggtttctttcaatggtactaacattgacgacagcaatcagcaggcatttgcacggaaatatagccgggcggcaggcaatgtcgatgaccagatcaaccgcgtgctcaatgcactgcgtgattctggcaaactggacaatacggtggtgattatcactgccggtcggggtattccactgagcgaagaggaagaaacctttgactggtcccacggtcatctgcaggtgccattagtgattcactggccaggcacgccggcgcagcgtattaatgctctgactgatcataccgatctgatgacgacgctgatgcaacgcctgctacatgtcagcacacctgccagcgaatatagccaaggtcaggatttgttcaaccctcaacgccgtcattactgggttaccgcagcggataacgatacgctggcaattaccaccccgaaaaagacgctggtactgaacaataacggtaaataccgcacttacaacttacgtggtgaaagagtgaaagatgaaaaaccacagttaagtttgttattgcaagtgctgacagacgagaagcgttttatcgctaactgattaattataaatcagttagcgaaatatcttacttgcaatcggtgtggaaaacggtagtattagcagccacgagtcggcacgtagcgcagcctggtagcgcaccgtcatggggtgtcgggggtcggaggttcaaatcctctcgtgccgaccaaaaatcccaagaaaaaaccaacccttacggttggtttttttatatctgcaattaattcgataaacagaccgtgacacatcacagcctgtttattttctgttatcagaacgtcctgagctttcatcctatgaaattaattgctgttaaaagcattgggtacagaaaatacccatagctccatacccggagtcagtttttaaaaactgtttaaagaaatgcacaagtattgtgattgattttttagttgtttttcttgatgagaagctgatgcaaaattccgtctttataatgaaaatgatgccaaagcgaacgacaaggttgtagttttcactacatgtccatacataaaatggggtaacattcacgcgcctggtagcgttaccaacgctacgctcaaacataatgattctaataaaacctcaggagactactatgcctgaagcaacaccttttcaggtgatgattgtggatgatcatccacttatgcgacgcggtgttcgtcagttactggagcttgatcctggctctgaagtggtcgccgaagcgggcgacggcgcgagcgctatcgatctggcgaatagactggatatcgacgtgatcttgctggatctcaatatgaaaggtatgagtggcctggatactctcaatgccttgcgcagggatggcgttaccgcgcaaattattatcctgaccgtatccgatgcctccagcgatgtctttgcgctgatagacgcaggcgcagacggttatctgttgaaagacagcgacccggaagtattgctggaagcgattcgtgccggagcgaaaggcagcaaagtctttagcgaacgcgtcaatcagtacttacgtgaacgtgaaatgtttggcgcggaagaagatcccttcagcgtgctgacggagcgcgagctggatgttctgcacgagctggcacaggggctgagtaataaacagattgccagcgtgttgaatatttccgagcagacagtaaaagtacatattcgcaatctgctgcgtaaactcaatgtccgcagtcgcgtggcggccaccattctgttcctgcaacaacgcggggcacaataaaaatagcccgatggatttatcatcgggctgagatttatgacaaacgcaaaactgcctgatgcgctacgcttatcaggcctacgtggatcgatcaatttattgaatttacacaattttgtaggccggataaggcgttcacgccgcatccggcataaactaagcgcactttgtcaacagtctagcccgatggcatcaccatcgggcctctttttatttactctcctgcgggctcaaatgttgcatcgcctgcgcgatactacgttcaatcaccgcacggcgagtatcgttggcaggtaagagtttcaacatcatctcccacgcggcaacggcttcgccaaatcgctgctgctcaaaggcattaaacgcatacatgcttagcacacggatattgctatggtccgttctcaccagctgacgtagcagttcaccgccgaggcggttgtcgttgggatcagaactacgagtcaacgcttcagcgtatcccagtgcagcatcactgtttttcggatcgaggcgatacgcagtggcgtatgcatcggtggcgatactggcgttacccagcgccatgccaacgcggcccaacataatccagccttctatatctcccggatttttttgcagttgagtacgcatccccagcgcaagacggctcatctcttcttcgttgagcggatcggctttcggatccagcgccctgtccagcaacgccggagcctgtgccgtggcctgctgccagattttcacctgctgataattgccagtctggtagtagctgacgccagccacaattaacgccaccacaatacccggcagataaacaacatatccggcacgcttaccttccggcacgctttgttcaggaaacgcttccggcaccacgcgtacccgacgccggctgcgggcgtatatgacccaaccgccaatgccaatagccactactggcagcacccacagcagcacggtcagcggcgttaacggcggatcgtaagtgacgaagttgccgtaacgcgccaccatataatcgacaatctcttttttacttttaccttcctgcatcagttcatacactttctgacgcaggtcggtggcaatcatgctgttggaatcggcaatgctgttgttctggcatttcgggcagcgcagttcttcagtgagctgacggaactgttgttcctgtgcttcatctttaaactgcaacacatcgatggtcgccagcgcactgccggagatcatcagcatcagcacgcccaataaaaacctcattgtgcggcctccttactgtatttctcccacagcggcttgatctcttcttcccagacgcgaggattcagatcgcccgcatggcgatagcgaatgatgccgttgccgtcaataagaaacgtttctggcgcgccatagacaccgagatccagccctaacatgccatcgccatcaaacaggcttagcgcgtaaggattgcccagctctttcagccagctgattgccttctggcgatcgtctttatagttcatgccgaccacgcggatgccctgcgcagaaagctgattcagatattgatgttccgcacggcaggtcggacaccaggtcgcccagacgttaagcagtactggtttgccctgagtcagcacatccgcctgataaaactgccccggattgtccagactttcgagacgaaacttcggcacaggcttgccaatgagcgcgctttccagattggtcggatcatccccttcggcattacgcgccagctgccacagcagcgccgcggcaatcgccaggaagataatcaacggaattaacaatactttgcgcttcatacggcctccggcgcagttttttgcggactcacgcgcttacgatagcgaggatcaaacagacacagcagtccgcccaacgccatcatcagcccgcccgcccaaatccagcgaacaaatggtttgtagtaaagacgcacggcccacgcgccgttttccagctcttcaccgagggccgcgtacaggtcacgcgtgatgccgccgtcaattgccgcttcggtcatcatgctcccggcagtgttgtaataacgtttttccgcatacagcaccgtttccggcttgccatcgcgcgttacgccgatagtcgccacaccgccacgccagttcgggccagtcacctctttgacatcacggaaggtgaagcgatattcatgaatatcgacgctatcgccggacttcatgcgcacatcacgctcaacgctatagttctggctaaaggcaatgccaacaattgtcactgccagcccaaggtgagccgccaccatcccccaataactgaaggtggttttcgtgccgcgactaatacgtagcgcagcttccgcaattgccagcaccgcaatccagcaggccattgccaggccgagcaccgtcatcgccacaactttgctttcgaacagccacggcaacagcaggctcagcaccagcgtagagatgaaggcgataatcaataaattgcggatcttacgcgggcgatcccgcccccagcgcaccagaggaccgacaccaagcagtagcgcaaacggcaccatcagccaggtaaacatggtgttgaagaacggttcgccaatgctaatactgcccagtcccagttgcttatgcaccaacggcagcagcgtccccagcaacaccaccagcatcgcagcgaccagcaaaacattgttcgctaacagcaaagattcccggctccacagcgcattgtttacgcgactgcgaactttgtgtccacgcgcggcaaacagcagcaggctaccgccaatcaccagcaccataaaggcgaggataaacataccgcgcgccggatcagacgcaaacgcgtgtacgcttaccagcacgccggaacgcacgaggaaagtccccaacagacacaagctgaaggcactgattgccagcagtaatgtccacgctttgaagctggcgcgttgttcagtgaccgccagactgtgcatcagcgcagtccccaccagccacggcataaagctggcgttttctaccggatcccagaaccaccagccaccccagccgagttcgtaataggcccatgcggaaccgagcacgatgccgagcgtcaggaagatccacgctgccagcgtccacggacgagtaaaacgcgcataagtgctgtccagacgcccgctcagcaaagaagcaatggcaaaagcaaacgccacgctgaaacccacgtaccccatataaagcagaggcggatggaagatcagccccggatcctgcaatagcgggttaagatcgcgaccttcaatcgggaagttcggcaacgtgcgagagaacgggttagaggtaaagagaatgaacagcaaaaagccgacactgaccatccccattatcgccagtacacgggccacaatatccagcggaatacgctgactaaaaatcgccaccgcaaaggtccagccgctcatcagcagcacccacagcagtaggctgccttcatgcgcgccccaggtagccgccacgcgataccacaccggaagctgggtattggagttgctggcaacataggtgacggtgaagtcgttgaccacgaaagcattgaccagcaccagaaatgcgccagccacagacataaacagcagccaggcaaacaagcgggaagacgccatcatgcgcgcatctccgcgcgccacgccccatagcggatacacggacagcagcagcgcaattcccagcgccaggcacagcagtccgttaccaatttctggcatcatgatgctgggtccttataaacttacgtcaacttgctgggtccttataaacactcgccgggcgacggtggttagcttccatcgctttctcaacttctggcggcgtatagttttcatcgtgtttcgccagcacttctttcgcgaggatatgattgcctttttccagttcgccctgcaccacaacgccctgcccttcacggaacagatccggcaaaatgccttcgtaagagacatccacactgccttcagcatcgtaaatggtgaaggtcactttcaggctattgggatcgcgctgcacactacccggcatcaccatcccgccaacgcgcagacgctgaccgacttccggcatttgctgagtttcacgcttgccgtagagaatttcccccggcgtataaaagagatcgatattgctgcgcagcgcatatagcaccagaccgatagtcagcgccagccctgccaacacggcacaggcaatccacaagcggtttttacggcgaatattcatgcagcctcctgctgttgcgcagcacgtaaacgcgcctcacgcgcccgctgttgcgccacgccacgcagaattgcgcgatgttgcatcacgctgtgcacgaccaaaaccaccagcggaataacggtcatcaccaccgccagccagacaaaaaaggcgtaaccgcccattgcgaaaaattcattccaggaagcaaatgcaggggtcatttacggcctcttttcagtatcagttcactcacccacggacggcgtttttccatcagcaaaatcaaattacgcatccgcatcagcgtcagcgtggcagacaggagcaggaagccaaaaatgctccagcgcagcgggctacgcatcgccggatcgatactttgctgcatccgcgtacttccctgatgcagggtgttccaccactccacggagtaatgaataatcggcagattcaccacgccaatcagcaccaggatacctgccgcacggcccgccagacggcggtcgtcgaaggcgtgccacagggcaatcacacccacatacaaaaacagcagcaccagttcagaagtcagacgtgcatcccatacccaccaggtgccccacatcggttttccccatgcagagccggtaaccagggcaataaaggtaaacacggcaccaatgggggccatcgccgccaccgccaggttggccattttcatctgccagacaaggccaataaacgctgccactgccatacttgcataaatgcccatgctccagatcgccgcaggcacatgcaggtagataatgcggtagctatttccctgctgataatcagccggagcaaagccgaatccccagatccagccgacggtaagcacgaccacactggcaattgccagccacggtataaaccagccacagatttgatacagccgtggtgggatcgccagttgatgcagtgttttccacatagtttcgataccagactcgaacaaaaatcagtaatccagcgttattgaatgctgattcgtaacgctgccgccgtcgcaaaaggacttaatgtcgcggtgcctgccagcaacgcgcctaaaattgccagatacccgtcaacgggcaaatgcatagaagccgcgtccatcgcggcggtggcaaagatgagtaatgggatagtcagcggtaacaccagtatgctgagcagcacaccaccgcgcttaagtcccactgtcagcgccacgcccggtgcaccgagaaagccaagcgtaggcgttcccagcagcagcgtcagcgccatcacttgccagccataaacatccattcccagtagcattgctaccagtgggctaaggatgagtaacggcagaccggttaccatccagtgcgccatcaccttcgccagcacaacggcgggcaagggtaacggcaacaacatcaattgttcaagactgccgtcctgcaaatcgtcacggaacagtcgttccagcgccagcaaggaactaagcagcgcagcaacccagataatgcccggtgcaatacgcgccagcagttgcggctccggaccgatactgagcggaaaaagggtaattacaatcaggaagaaccacagcgggttggcgatttcggcgctatggcgaaacgctacacgcagctcaagacggaaaatgcgccagaacatcatgcggccctcgtttgcgtcagactaatgcggcgaattttactttcagcaacgttgagcggctggtgggtagtcagaatcacaatccccccctgctccgtatgctgcgccatacgctgggtcagacgatcgacaccgttaacgtcaatcgcggtaaaaggctcgtcgaggatccataacgtggcacgggtcagccacagacgcgctaaagcgacgcggcgttgttgcccggcgctgagctgatttacaggaatatcttcgaatccggcaagcccggcctgcgccagggcttccagacattgtgcggtatcgccatcgcgatgataaaagtgcagattttctaacgccgtcagccgggttttgatccccggctgatggcctatccataacaggttttgatggtagctgtcgcgtacctgatgcaagggctgcccttgccagagaacctcgcctgcgtcagggcgagacaaccccgtcagcaaacggagaagcgttgtcttccccgcgccgttgctaccggtgatttgtacccactctcctgcgttcagcgtaaaactcaagccactaaataaggttcgttcatcccgctcacaaagtaactctctggcttcaagcatacccacgcaataaccctgttaaaaacctggctcgacttcacgcatatcgggcagcttgtgcgctatccctttatggcaatcaatacaggtttgcccatctttcaccgcctggtcatgcatcttcgcggcaacgcttttctgggcggttgtatccatatactcgaagttgtgacagttacggcactcctggctgttattgtccttcatgcgccgccactcattctgtgccatcgtcagacgatgagcttcaaatttctgcggcgtgtcaataacgccaaaaattttaccatacagctctttacttgctttgagcttgcgtatcatcttcggcacaaactcgtgcggaacgtgacaatccggacaggtcgcacggacgccgctacggttgttgtagtgcacggaatccatgtattcctgatacaccgtgttgcgcatttcgtggcagctaatgcagaactcttcggtattggctttttccatcccggtgttaaagccaccccagaagacgatgccgccaacaaaaccgatcaacagcagcgtccccagcgccagacggctgggggtacgccaccatttccacaggcgcttaatcagaccaggcttacggtcagaatttcccataataacctcttatttcccgtaacctttacttggggtaaaggtattccccacgattggcgcggtatcggcctgcggtacgtgacattgcagacagaaataacgacgcggagccacttccgcgcccactttgccgtcgctgtccataaagtgagtaggactgatacgcggcgcgccagtggtgcgatagctttcgacaccgtggcactgcaagcagcgattggtattggtcgttacctgataaccttcaacgctatgcgggatcattggcggctgattcacatagttcagcggcatccgatcctgctcttttggcatccgaatggccccttcctgtgtcccggatacttccgggctctggctaaaatcgacgccattagccgcccaaaccgcgccgcttaccaccagggccagcatcgccgtccattgacacagcgctttcttcaggtcatggcttttcatgatttcgctcccgaactccattatgtcaacttttcgctccgctactccatcgtgtagttattgtaaatacatcctcagaacagacatccacgcagcgaccgcacgtcatgcaatcgcggctggtgacctgcaccgggctttgttcatccagcaccggggcacgtagcacatgcggttccgggcaaacatgaaaacaatccatacagcggttacatttctgccgatcggtggccgcaacggtaatcacacctttgctacccagcacgccatacagcgcgccaaccggacaaatgtgcccgcaccagccgtgttcaacgaccagtagatcaaataaaaacagcgcgagaataagcagcgcgccgctgccgaagcccattaccaggctacgccccatcagagaaacggggttgatccattcccaaatgagcgtgccagttaaggcacttcccaccagaatgaccaccaacagcacgtagcgaatgtggcgagggatcgtcgcagactgattgaggtcaaagcgcctgcgtaaccagttcgctaagtcggtaatcgggttcagcgggcagacccagctgcaaaataatcgctttcccgccagggcgtagagcacggtgataatcaccgcaccggtcaacgccaccgtggcaggcagatgaccactggcaagactttgcagcgtcatcagcggatcggtcagcggaacggtgtcgaataacaggctactgctgtagttgccgtgcaagatccacacaccaaaccatggaccgctcaaaaacatccccagcacgaagaactgacaaaggcgacgtaacaccagccaacggtgactgcgccaccagccttttttctccagcgcctcgcgcccggcgtcacgtttacgatttgccattgttcccctccagccagccgttacttagcttttgccattgttcccctccagccagccgaagcggtaatggtgacctaactcccctttcgccagactcagcggtaacaccttgattgccggttgttccagcacgcatactttttcgcacttaccgcaaccggtacaggcgtcgctgtgaaccgtcggcagaaagcgggcgtgcttaccggtacgcgtgttgcgctccagctccagggtgatggcctcatcaattttcgggcattcgcgataacaaacatcgcagcgcagcccctgaaagttgagacagttttcctggtccaccagtaccgccagccccatccgcgcgtcgtcgatgctttcaatctcacgatccagcgcaccgcttgggcacactttggcgcacggaatgtcctcacacatttcgcaaggaatatcccgtgcgacaaaatatggcgtgcccgcgctcagaccagaggccagcgtcgccagttttaaggtgtcgtaagggcaagcctgaacacactgaccgcaacgcacacaggcactggcaaaggcgttctcgtttatggctccgggcgggcgcaaccgcacgccagatgcgcgtgcggtttgctgttgtaaccccagcgccacacccacggcagccagcccgcctgctgtgcgaacgacatcgcgcagaaagcggcggcgaccattttgaggtttcgcactccgggacataatggcttacaccttctccagtttgaccgcgcacttcttgaagtccgtctctttgctgagcggatcggtcgcatccagcgtcagtttgttaaccaactgtgcggcgtcgaagaacggcatgtacaccaggccctgtggcggacggttacgaccgcgcgtttcaacaatgctgatcacttcgccacggcgagaaaccactttcactttgtcgccacggcgcagatcgcgcgctttcgcatccagcgggtgaataaacaggaccgcttccgggaaggcgcggtgcagttctggtacacggcgagtcatactgccggtgtgccagtgctccagaacgcgtccggtagagagccacaggtcgtactcttcatccggtgcttccgccgccggttcgaatggcagtgcgaagatcaccgctttgccatccggtttaccgtagaacttatagccttcgcccgctttcacgtacgggtcgttaccttcgctgtaacgccactgcgtttctttaccgttcaccaccggccagcgcagaccgcgcgctttgtggtagtcatcgaacggtgccagatcgtgaccgtgaccgcgaccaaaccatgcgtactcttcgaacagccctttttgcagatagaagcccagctcgcgggattcatcgttcagctgatcttccgccagttcggataccgggaatttgctcacttccggtgtggcatacagcacttcgtacagcgttttgccacgcagttccggtttcttcgccagcagatcttccggccatacttcttcagttttgaagcggcgggagaactggactaactgccagagatcgcttttcgcttcgcccggtgcctgtacctgttgacgccagaactgagtacggcgttcggcgttaccgtaagcgccctctttctctacccacattgcggtcggcaggatcaagtcggcggccagcgcactgactgtcggatacggatcggagacgatgatgaagttgcgcggatcgcgccagcccggcatacgctcttcattgatgttcggcccggcctgcatgttgttggtacacatggtccagtaaacattcagtttgccgtctttcagcgcacggtcttgtgccaccgcgtgcagaccgattttcgccggaatggtgccgctcgggatattccacttcttctcgcagatatcacggtgtttctcgttggtcaccaccatgtccgcaggcagacggtgagcaaaggtgcccacttcacgcgcagtaccacacgcagaaggttgcccggtcagggagaacggaccgcaacccggctgggaaattttgccggtcagcaggtgcaggttgtagaccaggttgttagcccacacgccacgagtatgctggttgaagcccatcgtccagtaggagatgactttcttgttcggatcggcatacagctgcgccagttgttctaactggtctttcggcacgccggtcatttcggcagttttttccagcgtatactcggcaacgaaggctttgtaatcttcaaagctcatcggttcggaggcgtcagaacccggattcttcgctgctttttccagcggatgggtcggacgtaaaccgtagccgatgtccgtcgcccctttgcgcaggttaacgtgcttgctgaagaagtcctgatttatcgcattgttttgaatgatatagttggcgatgtagttcaggatcaccaggtcagattgcggcgtaaagatgatgccgttatccgccagctcgaagctacgatgctggtaggtagaaagcaccgccacggtgacgttctggttagagagacgacggttagtgatgcggctccagaggatcgggtgcatttccgccatgtttgcgccccacagcacaaacgcgtcagcctgctcgatgtcgtcatagcagcccatcggctcatccataccaaaggtacgcataaagccaactactgcgctcgccatacagtgacgcgcgttcgggtcgatgttgttgctacggaagcccgctttaaacagcttggacgcggcataaccttcccagatagtccactgaccagaaccgaacataccgatgctttccggccctttttctttcagggcggttttgaatttctcttccatcacatcgaaggcctgatcccaggtgattggggtaaattcgccttctttgtcatatttaccgtttttcatacgcagcagcggctgcgtcaaacggtctttaccgtacatgattttgggcaggaaatagcccttaatgcagttcaggccacggttaaccggtgcgtccgggtcgccctgacaggccaccacacgtccctgctgcgttccgaccagaacgccgcaaccagtaccgcagaaacggcacggcgctttatcccatttgatggcttcctgctgaccaacaacggcgcgggcaacgcccggcacgctgagaccggcagccgccgcagcggccgcaacggcgttagctttcataaagctacgacgactgagtttcatggtgtttcctcaccttgctcttcctgctggtgataaaccaggctcaccgccagcacgccctctacgttgcgtacactctcaatggtttggatcagcgtttcgctgtcttctgcttccaccaccacaatcaactgaccgctcggcgcgtcgctgacagcaacttcacagccgggaaaggcgttcagttgggtgctgatgtcactaattcgttcgcttttggcctgcacgaccaggctgcaaacttgccagttagtgtgcatggagatactccgcagttatggcacttaccggacagctggctgcacatgctccacatccgttgcaaagttggctattaagttgcggctggtagatcccggagagcgtcgggcgaaagataattgccattggctcacagctatcctgacagcggcggcattcaacactctgatacgccaggcacgcgtccccgatggtgaactgcaaatcccaggccctggtgtggcgcggagaaaataggctttcggggcaagcctgcgcgcaggcgtaacagaagctgcactcgttatttttgaaattaacgctcggatagccgcccgcgccgcgttgcagaatgttgttttcacaagcattaatacaggcgtcgcagcgggtgcaatgggtcagaaaatgagattcatcaccggaccagggcggacggataccgttactggctttgcgccagcgaccagtgagtatgccccgacgggatgcatcaatcttcacattgaccttccatcattaacgcgctctgaaaattgagagcgaccaaataaaccgcataattaataagccatttttatagccgctaagatattaaaggatgtgtcaaagatgcataccccgatcggggtaaaacctgtagcaggatcaaaagagtggcgggaagcgtggcaaaaacgggcttttgctcacatttcaaatggttataaatatatttatatagcgattgattcaccagagatatttctgctggtttgctctctcattagaatttaacactaaaagagcaggtaaaattgtctgaatgttctttaagttattcataaagcaaattaataaatctgatgaatatgttaaccttcagcgacatcatcggtgaaaacctataaatgaagaaggaaagcaaaaaaatgaagaccattctacctgcagtattgtttgccgctttcgctaccacttccgcctgggcggcagaaagcgtccagccactggaaaaaatcgcgccttatccacaagctgaaaaagggatgaagcgtcaggtgattcagttaaccccgcaagaagatgaatctaccctgaaagtagaactgttaatcggtcagacgctggaagtcgattgcaatttgcatcgtctcggcgggaagctggaaaacaaaacgctggaaggctggggctatgattattatgtctttgataaagtcagttccccggttagtacgatgatggcctgcccggatggcaagaaagagaagaaatttgtcaccgcgtatctgggcgatgctggaatgctgcgttacaacagcaagctgccgatcgtggtgtatacgccagacaatgtagatgtgaagtaccgcgtctggaaggcggaagagaaaattgacaacgcggtagttcgctaaactgccgtgaagtgcggcaccccgtaggtcagacaaggcggtcacgccgcatccgacatccaacgcccgagccggttgcctgatgcgacgctggcgcgtcttatcaggcctacaccgctgtgaagtgcggcaccccgtaggtcagacaaggcggtcacgccgcatccgacatccaacgcccgagccggttgcctgatgcgacgctggcgcgtcttatcaggcctacaccgctgtgaagtgctccaccccgtaggtcggataaggcggttacgccgcatccgacatctaacgcccaagccggttgcctgatgcgacgctggcgcgtcttatcaggcctacaccgctgtgaagtgctccaccccgtaggttggataaggcggttacgccgcatccgacatccaacgtccgagccggttgcctgatgcgacgctggcgcgtcttatcaggcctacaccgctgtgaagtgctccaccccgtaggtcggataaggcggttacgccgcatccgacatctaacgcccaagccggttgcctgatgcgacgctggcgcgtcttatcaggcctacaccgctgtgaagtgctccaccccgtaggttggataaggcggttacgccgcatccaacatctaacgcccgagccggttgcctgatgcgacgctggcgcgtcttatcagcatacgccacatccggcataccatgccggatgtggcgtatcattacaacgcaatatccgccacttctttttgaacgggttgcggtttcaactgcggtttcggcgtactatctgctgcctgcggcttgtcgtagttcaaccccagcacttcgctggtgtactgcaactcgcgttctgttgccgctacatcaccgttcagcttgcgtccataagacggaacgatcgctttcaacgtagcctgccattgcgggctggaaacacgatcgccaaatactttttccagcagattcaacataatcggcgcggcggtactcgcccctgggcttgcccccaggagcgcggcaatggttccttgctggtcactgacgacttcagtacccagacgcagtacgccacctttctcggcatcacgcttgataatctgcacgcgctgccccgcttgccacaaacgccagtcctcttttttcgcctgcggatagtactctttcaacgcttcaaaacgatcctcttcactcaacatcacctgactcaccagatatttcaccagatcgaaattatccagcccgacgtgcatcatcggcatcacgttagaggtggtggtggaactcattagatcccacaaactaccgtttttgaggaatttggtactgaaggtggcaaatggcccaaacagcactacgcgtttaccgtccagaacgcgggtatcgatatgcggaacgctcatcggtggtgcgccaacggatgctttaccgtaaaccttcgccagatggtgattaaccacgtccgggttttcgctaacaaggaactgtccgcccaccgggaaaccggcgtagtctttcgcttccggaatcccgctttcctgtaacagcttcagcgccgcaccgcccgcgccgataaagacaaatttggcacgaatgttctgtgcagtgccatttttcagatcggcaacggtaacggtccaggtgttatcgtcattacgctttagggcgcggacttcgctgctgagttgcaggctgaagttagatttcttctgcaaggaagcaattaactggcgggtgatctcgccgtagttcacatcggtaccaatttccgtacgcgtggctgccactttctgttgcggatcgcgcccttccatcactaacggtgcccactctttgatctgcgcgtgatcttcagagtaacgcataccgcgaaacaggctgctttgttgcaacgcggcgtaacgggcgcgcaggaaattgacgttatcctcgccccagacaaagctcatatgcggaacggtattgataaaactacgcggagtacgcagcacgccgcgctcaacctggtgcgcccagaactggcgggaaatctgaaatgcttcgttaatggcgactgctttttcaatactgatgctgccatcggcgttttgcggggtgtagttcagttccatcagtgcagaatgcccggttccggcgttattccagccgttgctactctcctgcgcgacaccctccaggcgctccaccatggtcatgctccattcaggctccagctcgcgtaaataggtccccaacgtggcgctcataatgccgccgccaatcaacagtacatcagtttcctgctcctcggacgctttcgcttttgccgccatgctaacggcattaagccccacggccatgctgaagagcatggcagtcacttttttcatcttgttaatgccttacttttagtcgctttattgcaggtgagatttgcgcggcatcaacggtaacacttaagtaacaacatttaaataatgtttataaattatattctaattttagaaacattataatttcgttgattaattatagggttattagaaatgaagggatttttagcatattgacctgacggcagcagtccgccaggtcagcgtcgtaatattatgccgtccgggcaacggcatcacggctagcggcatcgcgctcttcgcccgtcagctcgctaagttgcccattgcgcatttccagcaggcggtcggcgtggataaagtaatgatcatcatgactgatagcgaaaatagttttacccatctcctgcatcagcggcagcaacacctgataaaactcacgacggaagtgtggatcctgatccgccgcccattcatccagcaggataatatcgcgttcttctgccagcgccagcaacagcgccacgcgttttttctgccctttacttaacttcaggttaacaatacgcccgttgcttaactcaagcttatgagccattttcagctgcgccagccacttctcaaccagttgcgggttagcgggtttaccctccggccccagcagttgatcaaacagccagacatcggtaaacactgcgctaaacagtttgcgataatcttccggttgttcgccgctgacaggtttgccatccagcaagatttcgccgctttgtggctgatacaagcccgtcaacaacatcgccagcgtgctttttccgctaccgttgccgccaatcagaaacagcagctcgccacgtttgatggtgagattaatcggaccaacggaaaacgcgttatcctgataagcaaacgtcacgttacgcagctccagcgtttgccagttgggaaacgcctgcgggcgcggaaactctgctttgaaaggcgcgagcgcgaatttgttcagcttgttaaacgccacctgcgccgtcagcagcgtcggcaatgcgccaaccgcgctaagcagcggcgtacgcaggaataaaagcgtcaagctataggtcgcggcaacgttggtatcagcccaaccgaggctgttcgccatccagaacaccaggccgattgcgcccagcatcatgatgttactccagttcacggcactaagatggaaggtgtctgcgcgaataatatggtggcgatactcttgcgcatcaggaatgtagaggttgttaaacacatactcggcgcgttcccggttcagagtcagctctttgcgcccttcaagtacagtttgaaaatccgtgtacagcttgtcttcggtttcacgcagggtcgccatatgtttgtacacccgcgccaccagcacaaaaccgccccagatggtgatcgccatccagatagccgttaccagcaacattttgccgctcagcatccacagatacgccgcactaccgatagtgagaatgatcccctgcaccagttccggcagacgcacaaaagcaatggtgatattgcgcacatcgctggttaaccccgccagcaagctggcgctaccgagttgttcaatgcgctcgacgtgagtatccagaatccgcttgataaattcactacgcagtcggtaaacgaagtgatgccccaaagtggtgagcgccagttggcttccgagagtgactgccatcaacagcagcaataatcccagaaactccggcaacaccagcagactggtatccgccgtttcgataaggcgctgattgataaaagcaattaagccaatgcctaatgccgcactggcgaggcttagcgccatcacactgataaatggccagcgatactgccgccagacaagtacaagaagttccatgcagaaaacccggacaatgaattacagcccgcagtttaaacatcttcgcgcgcacagcaataataattcttatttttattcttttttacctgcctgacggaatgtcaggttgtagcggcagtcgatggtgagtggatgaaaccccgctttcaacggttgaataccgtgataaaacagccggctttcaccgccccataccaccacatcgccatgttccaacaacaaacgtttgagcggatcatttcgtttcaggccgccaaattgaaaaatcgcgggtaagcccagagaaacagaaacaattggcgcgcgcagatccggttcgtctttatcctgatgcaggctcagtttcgcgccaggagcgtagcggttgataagacaagcatctggctggaaatctggatagcccgccgccgtagccgcacgttgacataaattatgaaaactctgtggcatggcgggccacggtttatttgtttgcggatcaatggggctatagagataaccttgccgatgggtcgtccagcccagatgcccacagttggtcatcgccacgctcatggtatatcccccgggggtgaccatctggcgaaacgggctctggctggcaacgtcattaatatcgcggatcagttgctccgcagcgttaaaagcaaaacgccgtaaaattaccgcaccagccgccagtggctcttgccacggttcagcatcggcaaacagatccaacattacctctcctcattttcagcttcgcggcgcagcagttgcgctttacggctcacgccccagcggtaaccggaaagtgtgccatcaccacggaccacccgatgacagggtattatgatagccagcttgttggcggcacaggcgctggcaacggcccgtaccgctttcggtttgccgatggcgttagccagttgctgataactgacggtttcaccgcaaggtatcgtgcgcagtgcctgccagacttgttgctgaaaagcagtgccgcgaatgtccagcggtaacgtcagcggcgtatcgcgttgattgaggctggcgatcacttcacgcacatgttgctgaaacatcagatcggcaggcgcgttgtcggcagcgggaaacatctgctgcaactcgctgattagtgtcgcgtcatcatcgcccagcaatatcgcgcaaatcccccgctcgctttctgccaccaggcaacgacccagctcacaatcagccagcgcgtaacgcaccgccagattttcgccaccgtgacggaattgtttagccgtcatgcccagcgtttcgtcagctttgcgatagtaactgctgctgtcggggaatccggcgttaagaatagacgtcgtcacgctctcccctttcgccaggctttcgcgcaaacggcgagcgcgccaggcctgttgccaggctttaggcgtcattccggtagtcgctttaaacaaccgatgtagatgaaatggactcatcgccacctggtcggctaaggcttccagcgttacaggcgtttcctgttccagcagtcgacacgcgtgggtgattttatccaaccgatgttgctgggcattggctttttctggctgacaacgtttgcaggggcgaaagccagcggcgagtgcctcgctggcatttgcgtagaaggagacgttttcccgcaaagcatgtctggcgcggcaagacggacggcaaaagatgcctgtggtacgcacggcgaaaacgaattcgccgtcggcattcgggtcgcgggctaagacagattgccagcgttgatcgtcagttaagcatgtggcttttttcataatcagctccctggttaaggatagcctttaggctgcccggtcaccatcacgcaaaaaccaacaatcttgcgctttaatttttttcgctgacaaggaagcttttaaactgtggactcatccaggttttaaagctatcgccttctttggtgatcatataaaccgccagcccttcccggcgaacaacctctttagctttctccggcccgagtaccatcaagccagtatcccaggcatcggcttccagcgccgtcggagcaatcaccgtcacggataccagattgtgttcgatgggacgcccggtttgcggatcgataacatgggaaagacgtttgccgtccagttcgtaatagttacggtagctgccagaggtgctaatcccatgaccgttgatatccaccacagcctgaaccgcgttttctttatcggttggtttttgaatcgctacccgccacggcaggccttcaccgttcataccacggctgttcagcgcgccgcccacgctcaccagatagcgggaaatcccttcctgctccatcaagcgtgccaaatgatcggccgcatagccttcgccgacggtggagagatcgacatataaatccggcaggtctttttgcagatattgctgatggctctgattgatgaccgtcaggtgctgtaagccggttttggctttcatcgcatcgatctgttcctggctcggaatttgaaccggctgttgttccgggccaaagccccacagattcaccagcggcccgacggttatatccatcgcgccatcggtcttcgcgccaatgcgcaggctggtggtgacgatatcggccatcgcttcacttaccggccacgggcttaaactttggctgtcgttaaagcgcatcagcgcggaatcttttttataggtgctaagcagctgatcgtcggcgtccagttgggtctgaatcttttctttaagttcggcgctgcgtttggcgtcaatgcccgggatgctggcacgccagaaggtacccatagttttgccttcaagaacggtaacttcagtagcgtgggttttggcgggttgtggtttttgatcgcaaccaacaaagaagagcgcggcagccagcagtgccacgcgggtaaagcttatttccatacgtgattatcctcatgcgaacggtcgcaagagtacaccaaaaaactgagtttgtacgctgaaaacaatgaaaaaagggcccgcaggccctttgttcgatatcaatcgagattagaactggtaaaccagacccagagctacgatgttatcagtgttgatgccagcgtcacgagtgaactggttgtcgtccagcaggttgattttgtagtcaacgtaggtggacatgtttttgttgaagtagtaggtagcaccaacatcaacatatttcaggatatcttcgtcgtcgtagccacgacccaggtttttacctttagactgcaggtaagccagggacggacgcagaccgaagtcgaactggtactgagcaacagcttcgaagttctgtgctttgttcgcccaacccagggaacctacgcgagttgcgttgtaggtctgggtgtactgagcagccaggtagatgttgttagcgtcgtatttcagaccaccagtgtaggtttcagcacggtcgccgttaccgatgtaagcagcggtgttctgagcatcagtacgtttggagctggagatcgcaccaccgataccgaaaccttcgtaatcataagtgatagaaccgccgacgccgtcgccgttttgacgcagtgcgtcacgaccgttgttagttacgccactagtaaagccttcaccagatgggttgccgtttttaccctggtactgaacagcaaagttcaggccgtcaaccagaccgaagaagtcagtgttacggtaggtcgcgaagccgttaccacgctgctgcatgaagttgtcagaaccgtaggtgtcaccaccgaattctggcagtacgtcggtccaggaagttacgtcataaacaacgccgtagttacgaccgtagtcgaaagaacccacatcctggaatttcagacctgcgaatgccacacgggtccaggagttgttttcgttttcagcgctgttgccctggatctgatattcccactggccgtaaccggtcagctggtcagtaacctgagtttcacctttgaagccaagacgcatgtaggtctggtcgccatctacatctttgttgtcagagaaatagtgcaggccgtctactttaccgtacagatctaatttgttgccgtctttgttgtaaacttcagcagcgtttgctgcgcctgctaccagcagagctgggaccaggagggacagtactttaactttcatgttattaaccctctgttatatgcctttatttgcttttttatgccactgcatactgattaaccctcattaatcagtcggcaagtccattctccccaaaaatgcagaataatccaacacgaatatgatactaaaacttttaagatgtttcatttatcgctatagatgtttcaaaatgtaaatgcaagggaactttttaagattattgcggaatggcgaaataagcacctaacatcaagcaataataattcaaggttaaaatcaataacttattcttaagtatttgacagcactgaatgtcaaaacaaaaccttcactcgcaactagaataactcccgctatcatcattaactttatttattaccgtcattcatttctgaatgtctgtttacccctatttcaaccggatgcctcgcattcggttttttttacccttctttacacacttttcattattctgtgctaccacagaaaaactataacgcttgttaactatttcacaaataattaacatccgcataatttccagcaatctttgtttatttgcaattatttttgttgggctttttgtaggttatttgtacagcaaaatggcgcttgtacatctatttcccccaatgcaggatgataaatatcacgggagaatagagaatcatcaatcaggtaagagtctggaatttcacactgtaccctttatactgccctatcacttcgcgaagttttaacaggtcataaacacgaatgcgtcagaaagagacaacggccacgacccgctttagtctcctaccggggagcattacccgcttctttttactgttgatcattgtgttactggtgacgatgggtgtaatggtacaaagcgccgttaacgcctggctgaaagataaaagttaccagattgtcgacattacccatgctatccaaaagcgcgtcgataactggcgttacgtgacctggcagatctacgacaacattgccgcgacgacctccccctcctccggcgaaggtttacaagagacgcgcctgaaacaggatgtctactatctggagaaaccacgccgcaaaacggaagcgttaatctttggctctcacgacaacagtacgcttgagatgactcagcggatgtccacttatctggatacattgtggggcgcagaaaatgtaccgtggagcatgtattacctgaatggtcaggataacagtctggtgctgatcagtaccctaccccttaaagatctcacctccggatttaaagaaagcaccgtcagcgacattgttgatagtcgtcgtgcagagatgttgcaacaggccaacgccctcgatgaacgcgaaagcttttctaacatgcgccgcctggcctggcagaacggtcattactttacattgcgtactacctttaaccagccaggacatctggcaacggtcgtggcttttgatctgccgattaatgatttgatcccaccgggtatgccgctggacagtttccgccttgagccagacgcgacggcaacgggaaacaatgataatgagaaagaagggacggatagcgtcagtatccactttaacagtacgaagattgaaatctccagcgcactcaactctaccgatatgcgcctggtctggcaggttccttatggcaccttattgctggatacgttgcaaaacattctgctgccactgctgctgaacatcggtttgctggcgctggcgttatttggctataccacattccgccatttctccagccgcagtacagaaaacgtccccagcacggcggtcaataacgaattgcgcattttacgggcaatcaatgaagagatagtcagtctgctgccgctcggcctgctggttcacgatcaggaaagcaaccgcactgtcataagtaacaaaattgccgatcatttgctgccgcatttgaatctgcaaaacatcaccaccatggcggaacagcatcaggggattattcaggcgacgatcaataacgagctgtatgagatccgcatgttccgcagccaggtcgcgccgcgcacacaaattttcattattcgcgatcaggatcgcgaagtgctggtaaacaagaaactcaagcaggcgcagcgtctgtatgagaaaaaccagcaggggcggatgatctttatgaaaaacattggcgatgcgctgaaagaacccgcacagtccctggcggagagcgcggctaaactcaacgccccggaaagcaaacaactggcgaatcaggcagatgtgctggtgcggctggttgatgaaatacagttagcgaacatgcttgcggatgatagctggaaaagtgagacggtgctgttctccgtgcaggatttaattgatgaagttgtgcctagtgtgttgcctgccatcaagcgtaaaggtctgcaactgctgattaacaatcatctgaaagcacacgatatgcgccgcggcgatcgcgatgccttacgacgtattttgctgctactgatgcaatatgccgtgaccagtacgcaattgggaaaaatcacccttgaggttgatcaggatgagtcctccgaagaccgcctgacgttccgcattctggacacgggagaaggcgtaagtattcatgaaatggataatttgcacttcccgtttatcaaccagacccaaaacgatcgctatggcaaggcggacccgctggcattctggctgagcgatcaactggcacgtaaactgggcggtcatttaaacatcaaaacgcgggatgggcttggtacacgctactctgtgcatatcaaaatgctcgcagctgacccggaagttgaagaggaagaagagcgtttactggatgatgtctgcgtaatggtggatgttactagcgcagaaattcggaatattgtcactcgccagttagaaaattggggtgcaacctgtatcacacccgatgaaagattaattagtcaagattatgatatctttttaacggataatccgtctaatcttactgcctctggcttgcttttaagcgatgatgagtctggcgtacgggaaattgggcctggtcaattgtgcgtcaacttcaatatgagcaacgctatgcaggaagcggtcttacaattaattgaagtgcaactggcgcaggaagaggtgacagaaagccctctgggcggagatgaaaatgcgcaactccatgccagcggctattatgcgctctttgtagacacagtaccggatgatgttaagaggctgtatactgaagcagcaaccagtgactttgctgcgttagcccaaacggctcatcgtcttaaaggcgtatttgccatgctaaatctggtacccggcaagcagttatgtgaaacgctggaacatctgattcgtgagaaggatgttccaggaatagaaaaatacatcagcgacattgacagttatgtcaagagcttgctgtaacaaggtagcctattacatgaacaatatgaacgtaattattgccgatgaccatccgatagtcttgttcggtattcgcaaaagtcttgagcaaattgagtgggtgaatgttgtcggcgaatttgaagactctacagcactgatcaacaacctgccgaaactggatgcgcatgtgttgattaccgatctctccatgcctggcgataagtacggcgatggcattaccttaatcaagtacatcaagcgccatttcccaagcctgagcatcattgttctgactatgaacaacaacccggcgattcttagtgcggtattggatctggatatcgaagggatcgtgctgaaacaaggtgcaccgaccgatctgccgaaagctctcgccgcgctgcagaaagggaagaaatttaccccggaaagcgtttctcgcctgttggaaaaaatcagtgctggtggttacggtgacaagcgtctcagcccaaaagagagtgaagttctgcgcctgtttgcggaaggcttcctggtgaccgagatcgctaaaaagctgaaccgcagtattaaaaccatcagtagccagaagaaatctgcgatgatgaagctgggtgtcgagaacgatatcgccctgctgaattatctctctagtgtgaccttaagtccggcagataaagactaatcacctgtaggccagataagacgcgttagtgtcttatctggcatttgcaccgattgccggatgcggcgtaaacgccttatccggcctacgattcccattatttcaacaaattacattaaagtaggccagataagacgcgtcagcgtcgcatctggcatttgcactgaatgccggatgcggcgtaaacgccttatccgtcttagctatcccggcttttcctgaccctctcggcatataacgtcagcgtctgttttatcacatccagcgttaccggcttgctcaggcagctgtccataccggactccagacaccgctgcttctcttcagccaacgcattagcagttactccgattaccggcaacgtcagtcccaactgacgaatgcgttgcgtcaagcggtaaccatccatatttggcatgttgacgtcgctaagcacgatatcaatatgattcttgctaagtacattaagcgcatcgacgccatcattcgcggttttacattgatagcccaagcttcccaactgatctgccagcaaacgccggttaatcggatgatcatccacgaccagaatcatcatatcgtcattatcgctgaccgctttgtccgtactcggcagagcgttagcaggatcgtcgctctccatctcgatcaaataaatacgcgccaacaatgccggtagctcatgcggagcagccacactgtgtacccactcccctggcgctttctccagcggaataccaatatggcgacgacagaaggtcactaccgctctgccctgccattttttactcactacctcgtcagtgatcaacacatcttcgggagtcggttcctgcccttcgtatgttgtaacgacgatgccgctgcgctgcaaactggtttccaggaactgacagaggctcgcattgcggaccgccagccagcagcgtttaccactcaacccttccacgccttttttctgcgggtactgagcgccgtacaacggaatacgcacggtaaactggctgcccattcccggttcactatctacgctgatatcgccgtccatcatgctgatcagtttttcacaaatcgccagacccagaccggtcccctggaaattacgctgtacgcccgttccgacctggaagaagggatcaaacaagcgcaccacttctttcgccggtatccccacgccggtatcgcgaacacggatagagagataatcgccatccgcgcgaacatgcaaaactatacagccggtatcggtgaattttatggcgttactcaacaggttggagatgacctgctgtaaacgcatcgggtcgccatttaaggccactggcacatccggttcaataaagcagtacaagcctaactgcttgcgtaccaccagcggtaaatagttggcggtgatgtggttcatcacttcacgcggactaaactcacgcggttcgatcttcaactgttcgctttcaatcttgctgaaatcgagaatatcgctgataattttcaacaacaggctggaagagttgttcattgccgtcaccagccgatcgacgcctttcggtaactctttggtttgcaacagatccaggttaccgataatgccatacagcggcgttcgcagctcatgactgacggtggcaaggaacatgcttttactctggctcgcctgttccgctgcttgtgccatctcctgcaagctctcttccatcttcacgcggctagaaacatccaccagcacacaaatggccacgttttcattacgatagcggctatggacgaagctgatttgcagattggtattgttgctggtcaggacatcaacaaaattgacctgctgcccacagataatttgcgtcagtcgttggcggtcctcatgcgtaagcatattgagataggtatgcgccagttcgttacttaaaatattgacgccatcagcggtacgcaaaatgcagatacccactggcgcggaggcgacaatcttgcgattgaactgctcatgttcttccagtcgcagggcgtcgctttccgccggaatgaaaatacgtcgctcgtacatccgtgcgagagtaaacaatgcagctccggcaagcacattcagcaaaattgcgttaaggatcaacatgcgaatgcgttccagcaccttatcaaccggcacgctatacacgatgcttaggctactgggtggcagatttttcttcagcaccagctcccggaacccttccgtatagccaaaccaggagcgttcctgcatccagcgaggatcgcccttaattttactttctggtccggtaaggctaatcagggtatgaccattttcatcaagaatggtaacccccatcggcaacgtacccggtaagaaaaagttctccatccggatggtctgctcgacacccaaaagcgcctgcaaccggttcgccagataaactggcgtcaacgcgtaaaaatacccgacgccagggcgcggaccttcgctgatccagtagaggttactgccgctatcatcttgtggtgcatttcgatatttattgatgcgttcatgcaaagctttcaacgcggtatcgcgttccactggcatatcacgcagaccgaaattggccatgcagaggttatcgctgccgattaaaaatacccggtttagatcgtaagccgcagaaaaattatcgcgccagtagcgcataaaccacgccaaactctccagagaacctcgccaggtgttactcattgcggaacaatcggagtcggcaaacagcggttcaaacgcaggcacatccgcctgcgtttctcgtccacgcggggaaagcacaccgttttctgcgcttaagcgattttcggcgatgtacttcagctctttcatcacatcagaggtgcgttgaataaagcgctgagcctgatcggaactcagattaaattcctgacgaatttcgctttctcgctgatgtaacgcattaacgatgtaaaaaacggaactaaaagcaatcaacagccagagcactaacgccaatgctctgaacatgtagcggctggctttcagggttgtacgaaaagaagcaaggtatttcaaaggggcgaagctccgcctcaggtgaccgatggagtgtggttaaggtagcggtaaaagcgtgttaccgcaatgttctctcttctctggaatatgatacaccgccgagaaatcatcaccttaacctctgataatcgtcatataccggacaagactagtggatttcagcatgcattatatgaagtggatttatccacgccgcttacgcaatcaaatgatcctgatggcaatcctgatggtcattgtcccaacgcttactattggttatatcgtagaaacggaaggacgtagtgcagtcttatctgaaaaagagaaaaaactttctgccgtggtcaacctgcttaatcaggcactaggcgatcgctatgatctctacatcgacttaccacgtgaggagcgtatccgcgcattaaatgcagaacttgcccccattaccgaaaatatcactcacgccttccctggcatcggtgctggttattacaacaaaatgctggatgcgataatcacctacgcgcctagtgcgctatatcagaataatgtcggcgttaccattgccgcagatcaccctggtcgcgaagtgatgcgtacaaatacccctttagtttatagtggcaggcaggtgcgcggcgatattttgaatagtatgctccccattgagcgtaatggtgaaatcctcggctatatctgggccaatgaattaaccgaagatattcgccgccaggcctggaaaatggatgtgaggattatcattgtgctcaccgctggtttgctgataagcctgctgttgattgtccttttctcccgtcgcctgagcgccaatattgatatcatcaccgatggcctcagcactctggcacaaaatattcccactcgattaccacaattgcccggtgaaatggggcaaatcagtcagagtgttaataacctcgcccaggcactgcgtgaaacgcggacacttaacgatctgattattgaaaacgctgccgatggcgtcattgccattgaccgccagggtgatgtaaccaccatgaacccagcagcagaagttatcactggctatcaacgccatgaactggtagggcagccttactccatgttgttcgacaatactcagttctacagtccagtactggatacgctggaacatggcaccgaacatgtggcgctggagatcagttttccaggtcgtgaccgcaccattgaactcagtgtcactaccagtcgtattcataacacgcacggtgaaatgataggtgctttggtgattttctctgatttaactgcccgcaaagaaacccagcgccgcatggcgcaagcagaacgcctcgccacactgggtgagctgatggctggcgtcgcgcatgaagtacgtaatccgttaacggctattcgtggttatgtacagatcttgcgccaacaaaccagtgacccaatacatcaggaatatctgtccgtagtactcaaagaaatcgatagtattaacaaagttattcagcaattgctcgaatttagtcgtccacgccacagtcaatggcaacaagtcagcctcaatgcattggttgaagaaactctggtactggtacaaaccgccggcgtacaagcgcgggtcgacttcataagcgaactggataatgaattaagcccgattaacgccgatcgtgaactgctcaaacaggtactactgaatatcctgatcaatgccgtccaggctatcagcgcacgagggaaaattcgcattcaaacctggcaatacagcgacagtcaacaggccattagcatagaggacaacggctgtggcattgatctcagcctgcaaaaaaagatcttcgatccctttttcaccaccaaagccagtggaaccgggcttggtctggcgttaagtcaacgcatcattaatgcccatcagggtgatattcgcgtcgccagtttgccgggctacggcgcaaccttcacgcttattttaccgatcaacccgcagggaaatcagactgtatgactgctattaatcgcatccttattgtggatgatgaagataatgttcgccgtatgctgagcaccgcttttgcactacaaggattcgaaacacattgtgcgaacaacggacgcacagcattacacctgtttgccgatattcaccctgatgtggtgttgatggatatccgcatgccagagatggacggcatcaaggcactaaaggagatgcgcagccatgagacccggacacccgttattctgatgacggcctatgcggaagtggaaaccgccgtcgaagcgctacgctgcggagccttcgactatgttattaaaccgtttgatctcgatgagttgaatttaatcgttcagcgcgctttacaactccagagtatgaaaaaagagatccgtcatctgcaccaggcactgagcaccagctggcaatgggggcacattctcaccaacagcccggcgatgatggacatctgcaaagacaccgccaaaattgccctttctcaggccagcgtcttgattagcggtgaaagcggcaccgggaaagagttgattgccagagcgattcactacaatagccggcgggcaaaggggccgttcattaaagtcaactgcgcggcgctgccggaaagcttgctcgaaagtgaactgtttggtcatgaaaaaggtgcatttactggtgcacaaaccttgcgtcagggattatttgaacgagccaacgaaggtactctgctcctcgacgaaattggcgaaatgccgctggtactacaagccaaattactacgcattctacaggaacgggaatttgaacggattggcggccatcagaccataaaagttgatatccgcatcattgctgccaccaaccgcgacttgcaggcaatggtaaaagaaggcaccttccgtgaagatctcttttatcgccttaacgttattcatttaatactgccgcctctgcgcgatcgccgggaagatatttccctgttagctaatcactttttgcaaaaattcagtagtgagaatcagcgcgatattatcgacatcgatccgatggcaatgagtctgcttaccgcctggagttggccgggaaatattcgagagctttccaacgttattgaacgcgccgtcgtgatgaatagtggcccgatcattttttctgaggatcttccgccacagattcgtcagccagtctgtaatgctggcgaggtaaaaacagcccctgtcggtgagcgtaatttaaaagaggaaattaaacgcgtcgaaaaacgcatcattatggaagtgctggaacaacaagaaggaaaccgaacccgcactgctttaatgctgggcatcagtcgccgtgcattgatgtataaactccaggaatacggtatcgatccggcggatgtataacaccaaaacttgctatgcagaaatttgcacagtgcgcaattttctgcatagccgctcattctccttataaatccccatccaatttatcccttcatattcaattagttaaataactaaatccaataatctcattctggcactccccttgctattgcctgactgtacccacaacggtgtatgcaagagggataaaaaatgaaaacaaaattgatgacattacaagacgccaccggcttctttcgtgacggcatgaccatcatggtgggcggatttatggggattggcactccatcccgcctggttgaagcattactggaatctggtgttcgcgacctgacattgatagccaatgataccgcgtttgttgataccggcatcggtccgctcatcgtcaatggtcgagtccgcaaagtgattgctagtcatatcggcaccaacccggaaacaggtcggcgcatgatatctggtgagatggacgtcgttctggtgccgcaaggtacgctaatcgagcaaattcgctgtggtggagctggacttggtggttttctcaccccaacgggtgtcggcaccgtcgtagaggaaggcaaacagacactgacactcgacggtaaaacctggctgctcgaacgcccactgcgcgccgacctggcgctaattcgcgctcatcgttgcgacacacttggcaacctgacctatcaacttagcgcccgcaactttaaccccctgatagcccttgcggctgatatcacgctggtagagccagatgaactggtcgaaaccggcgagctgcaacctgaccatattgtcacccctggtgccgttatcgaccacatcatcgttagtcaggagagcaaataatggatgcgaaacaacgtattgcgcgccgtgtggcgcaagagcttcgtgatggtgacatcgttaacttagggatcggtttacccacaatggtcgccaattatttaccggagggtattcatatcactctgcaaagcgaaaacggcttcctcggtttaggcccggtcacgacagcgcatccagatctggtgaacgctggcgggcaaccgtgcggtgttttacccggtgcagccatgtttgatagcgccatgagttttgcgctaatccgtggcggtcatattgatgcctgcgtgctcggcggtttgcaagtagacgaagaagcaaacctcgcgaactgggtagtgcctgggaaaatggtgcccggtatgggtggcgcgatggatctggtgaccgggagccgcaaagtgatcatcgccatggaacattgcgccaaagatggtagtgcaaaaattttgcgccgctgcaccatgccactcactgcgcaacatgcggtgcatatgctggttactgaactggctgtctttcgttttattgacggcaaaatgtggctcaccgaaattgccgacgggtgtgatttagccaccgtgcgtgccaaaacagaagctcggtttgaagtcgccgccgatctgaatacgcaacggggtgatttatgattggtcgcataagccgttttatgacgcgttttgtcagccggtggcttcccgatccactgatctttgccatgttgctgacattgctaacattcgtgatcgcgctttggttaacaccacaaacgccgatcagcatggtgaaaatgtggggtgacggtttctggaacttgctggcgtttggtatgcagatggcgcttatcatcgttaccggtcatgcccttgccagctctgctccggtgaaaagtttgctgcgtactgccgcctccgccgcaaagacgcccgtacagggcgtcatgctggtcactttcttcggtagtgtcgcttgtgtcatcaactggggatttggtttggttgtcggcgcaatgtttgcccgtgaagtcgcccggcgagtccccggttctgattatccgttgctcattgcctgcgcctacattggttttctcacctggggtggcggcttctctggaagtatgcctctgttggctgcaacaccgggcaacccggttgagcatatcgccgggctgatcccggtgggcgatactctgttcagtggttttaacattttcatcactgtggcgttgattgtggtgatgccatttatcacccgcatgatgatgccaaaaccgtctgacgtggtgagtatcgatccaaaactactcatggaagaggctgattttcaaaagcagctaccgaaagatgccccaccatccgagcgactggaagaaagccgcattctgacgttgatcatcggcgcactcggtatcgcttaccttgcgatgtacttcagcgaacatggcttcaacatcaccatcaataccgtcaacctgatgtttatgattgcgggtctgctgctacataaaacgccaatggcttatatgcgtgctatcagcgcggcagcacgcagtactgccggtattctggtgcaattccccttctacgctgggatccaactgatgatggagcattccggtctgggcggactcattaccgaattcttcatcaatgttgcgaacaaagacaccttcccggtaatgaccttttttagttctgcactgattaacttcgccgttccgtctggcggcggtcactgggttattcagggacctttcgtgatacccgcagcccaggcgctgggcgctgatctcggtaaaagcgtaatggcgatcgcctacggcgagcaatggatgaacatggcacaaccattctgggcgctgccagcactggcaatcgccggactcggtgtccgcgacatcatgggctactgcatcactgccctgctcttctccggtgtcattttcgtcattggtttaacgctgttctgacggcacccctacaaacagaaggaatataaaatgaaaaattgtgtcatcgtcagtgcggtacgtactgctatcggtagttttaacggtagtctcgcttccaccagcgccatcgacctgggggcgacagtaattaaagccgccattgaacgtgcaaaaatcgatagtcaacacgttgatgaagtgattatgggtaacgtgttacaagccgggctggggcaaaatccggcgcgtcaggcactgttaaaaagcgggctggcagaaacggtgtgcggattcacggtcaataaagtatgtggtagcggtcttaaaagtgtggcgcttgccgcccaggccattcaggcaggtcaggcgcagagcattgtggcggggggtatggaaaatatgagtttagccccctacttactcgatgcaaaagcacgctctggttatcgtcttggagacggacaggtttatgacgtaatcctgcgcgatggcctgatgtgcgccacccatggttatcatatggggattaccgccgaaaacgtggctaaagagtacggaattacccgtgaaatgcaggatgaactggcgctacatagtcagcgtaaagcggcagccgcaattgagtccggtgcttttacagccgaaatcgtcccggtaaatgttgtcactcgaaagaaaaccttcgtcttcagtcaagacgaattcccgaaagcgaatagtacggctgaagcgttaggtgcattgcgcccggccttcgataaagcaggaacagtcaccgctgggaacgcgtctggtattaacgacggtgctgccgctctggtgattatggaagaatctgcggcgctggcagcaggccttacccccctggctcgcattaaaagttatgccagcggtggcgtgccccccgcattgatgggtatggggccagtacctgccacgcaaaaagcgttacaactggcggggctgcaactggcggatattgatctcattgaggctaatgaagcatttgctgcacagttccttgccgttgggaaaaacctgggctttgattctgagaaagtgaatgtcaacggcggggccatcgcgctcgggcatcctatcggtgccagtggtgctcgtattctggtcacactattacatgccatgcaggcacgcgataaaacgctggggctggcaacactgtgcattggcggcggtcagggaattgcgatggtgattgaacggttgaattaatcaataaaaacacccgatagcgaaagttatcgggtgttttcttgaacatcgacggcgaaggtaaccccattaatcaccagtcaaaacttttcaccagcgtcagctcgccagcattacgcatcggtacaataaatgtttcctgtttctcattgacgcttccttcatcggtgatcagcgtcagttgggcggtggttaattccgtttcgctgcgcccaccatagtagttgatatacacctgatagcgcccgtgaattggcgcgggcatggcgaaaatctcgggtccgtaccccgtcgtgacatccatatccagtgcaccactgtttttcagcacggtgttaccgtaccaggcgtgttcgccatcgggcgtaacaacgtgaaggtcgaggtcggtattgtccgtatcccagctgagaaccagccgtaaacgtgcacgaatcgttcctgtacccggcgtactgtaaaactgcattttttgtcggctttgcccatccgggctgatgacctgcacgctgttgctgccttcagtgaaaatataagggcgtgcaaaactaccatcggattcaattctctgcggcatactggcaccgttgaccaccagccggccctgctgaactttacccgccgcagcataattctttattttgccgcggatctgcgcactgatattttgatcatctgccatgttgacggagctcgccgggtaattgatgctttgactaaaactggcatcttcgccctctgccggatgccagccactgagcggtgcatcaatctcgacttcctgcacaccttcactgtgagcgacagggctaagcgccaccagtaacaacggaagaaaaatctttcgcatagcattagtccattaataattgtcgggtcagcgtttcgatatagttctcatcaagcccggtgggataaccatcaaaggccaggtgcagatactcatgggttaaatccagccgatcctgaagcgtaaagaagttacgaataaacagccgtttctgctgccgatcggtataggggaaaccactgactaaacggcaaaccgcaaacacgtctggttcgttgtaccccgtctcagcttgtaatatacgccgccactgcggcatttttttcgccagccaggctttcgctttgggtaataactggcaggtactgcgtggcgctccccagcggctaagactgttgtcgggataagcaaacgcgagtatctgatcgtaacgctctccctgccccgcctgggccgtggcttgccgccaggaaagtgtcccttcggtagcgcgactgccatgataatgaaccggatcgcctgcatagatgagatcctgcgtccaggcggtcatcgttcgcgcccccgtggtcgctgggctagcagaaacacgctgcgtggcgctgctgtcggggatggtcaggcaatcgccttcccgattggcgttttgctgtaaaaaagtgcgaatcgccacggtcatggctttcgctgcctcagggggcgtacttttcgcctcgcgatccagaactctggcaacgtactcttcacgatcgagatggctctgcaatttcagtttgcccttttcgctcagtaaggtcgtctcaccgtggctgacaaacgtaatgtggttaccattagtaaacgtcacacgatagcgcccattaagtacgccgggatttactgccgtcgtactcttttccgctgtgattttcttcagcggatagcgggcaaacagctccacctctacacattgcccactggcaacctgcgtcggcactggcaaaacccgattaagcaccgtcgcataacgggttagtaccgttttgctggtgccactgccagtaacccacagcggtgtaccatcggttaaccagccagcaaaaccaccctgacggatttcctgtttatcatcggcaaaccagctccaggttttcacccgtacccgactaccgagcatggatgcgacaccgattttcgcctcgtccagcaccacatccagtaagacttcctgagctttgttttgcgcgggtaacgtcgctaaactatcaagcaggcttttaaccgttacgctggtttctggcttcagcgtagtcagagacgctaaccacgcaggtgcctgacgctgttgccagtattgcccccacacatctgcgccaatatgcaaccgctgcggcgcaaaatagagcccacaggaacgtaccagcgcggtatcgcgcgttatgctctccccagcctgacaacaataaacctcttccggggagtttccgcgacactggtagggctgctccggttgatgggtatcctccagccaggcgtaaacatacagtttccacaaactccctaacggcgtggtgaggctgtcaggtaatgcactgactttggtcacgccactactgctcagctgatacagttgatcgtgctgcgcaccgcgcagcaccagttgtaacggcgtctcctccgcaagtgttggcagagtaaccaacgccaatagccagacgattcagcgccagttcacttatttcacctgcatcccggtccattcactccctgccgcaacactttgctgcgcaggtgcataggaacgcacataacgagcaggaggcagaacgaattgccctttttgcgagaagcgcagcaaatggcggaaagtgaccgttcccgtcagttctttcaccggcaccatataggccagttcgcccatttcatttcgcgctttttccagcaattgcccctgctgtttcgcggcgttgggtttattgaccgaaatgccccatgttgtgcgctcaacgtcggctcccggtggcagcggtacttccacctgaccgtagcgcagaactgcatcctgctcgctggtaagcgtgatttcatcgagatacagcgcatcgctgtcaatctcattgctggtcaccggttgcagaataaagctcatctcttcttcaccagggataagccgatacaactggcgttcaacggtcaccggaatgttactttgttgagccatttttgccggctcacgtcagcggacctgcacattttgcggcgataattcgtcaccaaaagagagaatgtccggcacgccctgaccaacccaacgccagtcttcgccccctccagttaacttatgtttagcccatgcgcccgcaggcgcaggcaaaacaactggaggcattgtcgccatatatttcgccagccagttcatggccagcgcgcgctcaatagtggattgctcagcggtcaaaccacttaaaatagcggccgtctgggtagcgtcgccaccgctattaagcagcacaaccgtgtgcgccagcggctgattgctgtttgccgctttatcccacgcatattgctgaacctgtggcatcaccgtggacttcaactgcgcttttttcagcaacgtcatggttaagacgtttgccaccgcatctgccagtggagactccggtgtatcgaggatcaggctatcattgatatcgcgggtgtcttcctcagagaaatcttcagttttagttccgcgccgggcgatagcttcatccaaccctttcaacaacgttttgcacggcaaattcatctcctgcgcccatgccagcaccagcgcccgatgcaataacggcatgttatctgcctgctccgcgtagctgtcgagcatatgctgccagtattccggttgttgcgttacgccgatcgcctggctggcctgccagtcggcgtaccatgcccatgccgtaaggaaggcgtcaccattgccatcttcaccccaccaggtaaagcgcgctccgggccccgccagttgcatcagccgcagacggttatcctgaatcatctgacgaatgtcgttagcggcggcactttgatgatcggcaagcgaacgccaggcgagactgagcgggatcagacggctaccggtgttgattacgccaccccacggttcatcgactaacgcatcaagattgttgcggaaaatctcctgcggcgtttcactactttgtagccggatattgctcgcctgctcgggcaacatcagcgcgttatcgccaccaccgagcatgacatttttctgctgttcaacgggccagctgttatccacaaaagacagttttgtgctaatgctgtcctgcacttgcccattttgttgcagttctgcacttaacaagccagattgctgaatattctgcgtcagcgaaatataattcgcccctttgtgcagcgtcagcgtctggcgcatctcagcgcctgcaaatttagtcaccagcgccaccggttcgttatcctgctgactgaagataaatagtcctgccgccggtttgtcgcccacgcgatacaccgttggcatactccacttcatgtagagatttttttccgaacgcagataagcacgcccctgcccgaccagcccgtcgccgttcatcccacgcgcggtgatacgccagcgggttaacgaatcaggcatcaggaacgtgaaatacgctttgccttgtttatcggttgtgagtgacggcatccatgccgcggtatccacctcttcacgccgtggacgttcaagcatttttactcgccgctcgctgcggttagttgcgccaggcgcaaccggctcgctggagagcgcctggtcgtagctgataaacgacagactggagctggtacgcacattgttacgccccagcggatagaaaaatttgccgatattcggcgcgatttctggttgcagcgcgtagatcatttcatcgaccacgcctaccgttagctgcgcagaaacaggtttacctttcagcgacgaggttaattcgacattgaccagttcaccaggctggtaatgggttttgtccgttttcacccggatatccagctggggaacggcaactttgatcccggcgttctgaaaactgtactgaccgttacgggtatacagcaccgaaaaagtgatgttaggcgcaaaggaattgctcactggaacccgggcttcatactgggtatcgtttaaacgttgtagcgttagccagtttgccggatgcgaaagcagcgactgctgttccacgcgatcgcgttccagcgtcaataatgcttcatcaattggctccggaaaggtaatcagcatcttcgcggtttcgcctggctggtacagcgttttatccgccacgatatctaccgtaccagtatgcgccgtgctgcccttaccgctgacggcatgacttaacccagcgagaattaagccgtctttatcgcgtaatgtcagattgtagttgccaggtttagcgaaattgacggtaaaggatttgccgcctgacggtagctctccgctatggctcgtgcggtcttcgagacgcaaccattcatacgtaacaggaacctgttttgaagattccagcgcggcataacggaacacaaccgactcgccgctattactgtattgtgcggcagtacttaatgagtaatgcgccagaccgcgttcaatgaggatctctttggtggtggtgacgcgatacgccgcgccgtcactggcggagacggttaacaaatagcggctcggtttatcggcggcggggagatttaacgccacatgaccgctggcgtcggacaccgtttcgctgccttccagcgacacggggaaacgtccggcataacgcaaatcgttaccgaccattgataattgctgagcgcgcaaacttaactgcacgcgggcattttttaccggctcgccatccgggtagagcagttgcagtttgccgctgaccgcttcgccagttttgaactcttttttggcgagagctaaaccaatctcgaaatgtggcttgatgtagtttgccacgcgaaaactgctgctatagacctgattgcggtaagcaagacgtaactcataacctccggctacggcattttctggcaggcggaaacttccctgcccgccattgcgcgcatccagcgtgacattgacggtttgcaacagactgccgttggcgtccagcaccgaaagcttcgccggggcgctgacgatgggggatgaatgcaacggatcgtggaactcgcggccgatcactttaacatcgacacgatcgcctgcgcgatatagcgggcgatcggtaaaaatatacaagcgggtgttgtagatttcgctttcgtagaagaagttctcggagacaaaaacgccgccttcagcatccttacccagaatgtatgaacgttctggcgatatatgttgtaactgcaaggtaccgctgtcatcggtcacaccgcgggtcatcacgccaagaccgtcagtccacaagatctctgagccgggcttcgcttcaccctgttttttacccgcggtccacaccagaagctctttgcctgacactttgctaagcgccacggtatcggaaacaaacaccaccgtcgtcgcccgatacccaccaaccatcgcctcgacgaggtacagtcccggctcttgttggccgagaggaatataaatgttacccggctgcggcgagatgaaattgctggatgcgccttccagttttaccccttgctgcggctcgaacggtttagcctgccatagtggataacggaactgtttcaccaggggatattttttcagcggggaaaactggttgttctgtacataacgggaaggtttaataatggcattgccgagctgtaattcgggtaacgcctgagtcacattctgccgtgactgagaagagaaagtacgctgcatcacgcggcgagatttgccgtaccagttatcccacagccaggttagcgtattgttcagcccgtcgcccagatattgcggttgcaccacaatgcgatgcaggtttttctgctggcgcaaaaatgccatcgggtcaggaatacgatacaggcgaacgtccacgccgccgtactcttccatctgatagcgccgataatcacgccccggcgcttccagtcgcactttcgcctcttcactgctgctaaaactgctgtcagcaagcaaaaagaatgttcccccggcaggcggcgcatagttgctggaaggaagcgaatcatcagcattagcaagccctgttcccacaagagacagggacaagcacgctgttatcgcgccagaaaatttaaacgataaatgccaatgaaattgggattggaatcgttgggtatccatcgggtgtccttccatgtcataagttgttgcagactgactgcgcgcattccgttgtcagttttcgtggcgcttccggtgtggtagatgacgtaacgccccatccagaccattaagtgctgggcatcgccctgatcgaaaaaaatcatatcgccaggcagcgcctggtttatgtcctggccaataaactggctgttgtactgaatcaaattaatcgcggtcacataggggccggttttcccgttcccctgattccagttttgcgccagttgacgctgttcaggtgttagcgtcatctctggcggcaaatactggctagataaaccgttactttttagccatttactgtcgtgaactttcagcgtctcgttcgccgcaaatcgcaccaggcccgcacaatcctgctgataccagcgtggacttggcccctggcggagctgttcttgtgcaatgcgtacaaaccaggcgcgaaacagcccggattgttcgacattcagcatttcgctatgggcaacaacacaacacagccagcaaatcagcgccagcagcccgtgcctcatagcggctgccaggttatgggtagccactgccaggcggcaccgggttccatctgggccagcttcatgacataacgcggttgttgagataaagcgtccagcttcggcattaataaagtttgtgcggcgttataaaaaaccggttcgagattcttcggcagactggtcaacgtttcgttacgcagcagtttcgctattccttgtggattgatatagagcggaacgatgccatcagtgggtattacatccaccattgccgggcgggttttattcagtgtttgcagcgcgttattaaccagcgtgtcatcgagggagaaaagcagcgttttgttttgcatcgccaggctcacacggaaaaaataatcgctcattaattgatcgggttgcgccgcctgcgctttcggatactggccgtatcgggaactcacttcgcgacgccagatttgcgcttcgccctgctgagtctggcttaccggcaaaacaccttctggcgctttgctttcgtgcgcaccaatattttgcgtaaacagtttccctggcaattgcgcctgttcggcagtgccatcaaactgaccgacaaacagcggggtttgcaatttactgtcttcataccagcacagccccgcggcaccgtctaacgccccattcagcttgtcgttttcctggctgatgtggctaagcatctcttcggcaataccgtgactatacggcaccgccacacagaagctggctccggcaggcatactgttccataccggcgtaaaatcgaaactggcatctacgctggcggattcatcatttaacgccacaaaactgtgccagccgtcgttacccatttcgaagcgtacgccagcaaaagaaggcattaaccgctggtagccaaaccccagccacctggcgctgactacgatgcgctggcgtactggcgttttttcggcagtacgctcttccaggccaaagcttgcttgccagcgttttttgccgctcaacaaatcacctgcgatcgccgtggcttcggtatcctgctgatcatctttaaacaacatatccgtgctggaaaacaccagcatcttgtcctgataagtcgcgaacatcagggcgttattgccgttatagcgcaactgataaacaggaacagtttcactatttatcttgatgctactgatttccgttttgcttaactggctgtcgctggtagcggcaaacaacaatggctccagcagtttgcttaaaccactgcgctggatcagcaccatataatgactaagatggccttgtttatcgtgccacagcgctgcctgcgcgggctgatctaagagactgctaaagagcttatctttcagcgtgagatcgtgttcatagacaatacgacgaatgctgccttcaatgcccagacgatcggcatgattctgataatagaaaacgaaatcttcgctcagaacatcgtggagaaacggaatggtgaggagatctttgggaagctggctcagagagtcgctgtcgagaaagaggtccggctcattgagatcgatttgcagattgttgtgcaccaccagcgggctcaacgttttttctggcccactgccagcatattgcaacgcccagacgccagcggaaagcagtgctattgcgccaaaacctacaagaccatagaaccgccagcctttcgccttttttcaccactcattgccacattccttgtgtatagccagccattttttacgggcacagccaaactttaccgtgccctaatacgacaaaagcccagactttgcagcctggacttttcaattcaaacaagggagatagctcccttttggcatgaagaagtaaaattattcttcttctggctcgtcgtcaacgtccacttccggagcgatttcatcgtccccttccgcggcactgccgtcgatggtatccagatcttcctcgtcaaccggttcagcaacacgttgcagacccactacgttttcatcttccgcagtacggatgaggatcacgccctgggtgttacggcccacgatgctgatttcgctaacgcgagtacgtaccagcgtaccggcatcggtgatcatcatgatctggtcgcagtcatctacctgtaccgcgccaacaactaaaccgttacgttcggtaaccttgatggagataacccctttcgtcgcacggctcttggttgggtattccgccactgcggtacgtttaccgtaaccgttttgcgttgcggtgaggattgcgccatcgccacgaggcacgatcagagagacgactttatcgccttcacctaagcgaataccgcgaacaccggtggtgttgcagcccatcgcacggacagaagactctttaaagcgcaccactttaccttcagcggagaacagcattacttcgtcttcgccgctggtcaggtcaacgccgatcagctcatcgccgtcaaccagtttgatcgccactttaccggcggtacgcagacggttgaactcggtgaggacagttttcttcacggtaccgttagcggtcgccatgaagactttcacgccttcttcaaactcggtcactggcaggatcgcagtgatacgttcgtcctgctccagcggcagcaggttgacgatcggacgaccgcgcgcgccacgagtggcttccggcaactgataaactttcatgctatagacgcgaccacggctggagaagcacagaatatggtcgtgagtgttcgccaccagcagtcggtcgataaagtcttcttctttaatacgtgcggcagatttacctttcccgccacgacgctgcgcttcgtattcagaaagcggctgatacttaacgtagccctggtgagagagcgtcacgaccacatcttcctgggtgatcagatcttccaggttgatgtctgcgctgttggcggtgatttcagtacgacgtttgtcaccgaactgttcacgaaccagctccagctcttcacggatcacttccatcagacgatcggcgctaccaagaatacgcaacagttccgcgatctgatccagcagctctttgtattcgtcgagcagtttttcgtgctcaagaccggtcagtttctgcaaacgcagatccagaatcgcctgagcttgctgttcggtcaggtagtacagaccatcacgcacgccgaactctggctccagccattccggacgcgcagcatcgtcgccagcacgttcgagcatcgcggcaacgttgcccagctgccacggattagcaaccagcgcagttttcgcttctgcaggcgtcggcgcatgacggatcagttcgatgatcgggtcgatgttcgccagcgccacggctaatgcttcaaggatatgagcacgatcgcgagctttacgcagttcgaaaatagtacgacgggtcaccacttcacggcggtgacgaacaaacgccgcgatgatgtctttcaggttcatgatcttcggctgaccatggtgcaatgccaccatgttgataccgaaagaaacctgcaactgggtctgggagtagaggttgttgagcacaacttcaccgaccgcatcgcgtttcacttcaatcacgatgcgcataccgtctttgtcagactcgtcacgcagcgcgctgatgccttccacgcgtttttcttttaccagttccgcaatcttctcgatcaggcgcgctttgtttacctgatacggaatttcgtggacgataatggtttcacgaccggttttggcgtcaacttccacttctgcgcgagcgcggatatacaccttgccgcgaccggtacggtaagcttcttcaataccgcgacgaccgttaatgattgccgccgtcgggaagtccggccccgggatgtgttccatcagcccttcaatgctgatgtcttcatcatcaatatacgccagacaaccgttgatgacttccgtcaggttgtgcggcgggatgttggttgccatacctacggcgataccggaagaaccgttcaccagcaggttaggaattttggttggcatgacgtccggaattttttccgtgccgtcatagttatcaacgaaatcgaccgtctctttttcgagatcggccatcagttcatgggcaattttcgccagacggatttccgtataacgcattgccgccgcagagtcgccgtcgatagaaccgaagttaccctgaccgtctaccagcatataacgcaggctgaatggctgcgccatgcggacgatcgtgtcatagaccgcgctgtcaccatggggatggtatttaccgattacgtcaccaacgacacgggcagattttttataggctttgttccagtcattgcctagtacgttcatggcgtaaagtacgcgacggtgtaccggcttcaggccatctcggacatctggcagcgcacggccaacaatgacgctcatcgcataatccagataggagctcttcagctcttcctcaatgttgaccggtgtaatttctctcgcaaggtcgctcatctaaccgctatccctctactgtatcccggattcaaaggtcgcaaattataacacagccgcgcagtttgaggtaaacctatacgctttattcacatccaatgcctgatatactcgtttgtcttgccaattacggagtagaagtgccaatgaatgccgaaaaaagcccggtaaaccataacgtagaccacgaagagatcgctaaatttgaagccgtcgcctcccgctggtgggatctggaaggtgagttcaaaccgctgcaccgcattaacccgctgcgtctgggctatattgccgagcgtgctggcggtttatttggcaaaaaggtgctcgatgtcggttgtggcggcggcattctggccgagagtatggcgcgcgaaggcgcgacggtgaccggtctggatatgggctttgagccattgcaggtggcaaaactgcacgcactggaaagcggcattcaggtggattacgtgcaggaaaccgtggaagagcacgcggcaaaacatgccgggcagtatgatgtggtgacctgcatggagatgctggagcacgtccccgatccgcagagtgtggtcagagcctgtgcgcaactggtgaaaccaggcggcgatgtctttttcagcacacttaaccgcaacggcaagagttggctgatggcggtggttggtgcggaatatattttgcgcatggtgcccaaaggcacgcatgatgtgaagaagtttattaaaccggcagaattgctgggctgggtggatcagaccagtttaaaagagcggcatatcactgggctgcattacaacccgatcactaatacttttaaactcggccccggcgtggatgtgaactatatgctgcacacgcagaataagtgaggttgatgtttggccgcgccaatgcctgatgcgacgcttgccgcgtcttatcaggcctacaaatgctccccgtaggccggataaggcgtttacgccgcatccggcaaccgtgccgactagacagtgattaccatttcaccgtcatgctcaaaaaccctgccgtctgggcaaaatcatcactccctttctgccacgccacgctgccgcgcagggacactcgctgactgatattgcccgtgactcccacttttatttcaccccgttgcttcaccgcatcgtcactgatagtgctgccatcctcttcaatttccgtgctatggggatcgtgataataattcagatctaatgttggtatgacatgaacagcggtacgccattcgctgtgtaaacccagccgcgtctgaatatcatcaccctggctttgactcacgcgcgcacggttagcggcggtaaaatcatcctgctgcacgccctgataaatcacctgcgcctgcggttcaatcaccacaccacgccccggtaaccactgataccccgcctccaggctggcgataatcccgctgctgtggtaatgatctgtgccatcttcttgttcggaaacatcattgctaaaccacgcgtattgcagccagctatccagccaggccccttgcttctgattaccgtgctgaaaccagctacttgtcagcccaacggcataaccgtggttctggttatcggcgcgagttccggtcatattgctgcggctgtcgccctggttatcgctgtagccaccaacaatcccaagcatccactcgccatccgtgccccagcgcccgctaaacagatcgccgctaagttgcaccgtagaagtgtcttcatgttgagccagttgccccgctgctgtgtaatgataatctccgccgataacacgtaaattcagcgtctgaccatcgccacctgcgtgatcgcgtcgctccatcataaacgcctgatttgccgcccgcaggttattaagataaccgccaactttggcattcaacaccggctggtaagcaggcgtaggttccgggtcgggtgttggatcaggatccggcgtgggatcaggatcgggagtcgggtctggatcaggtgggcttggcggcgttacttcttggcttcgcagataccagtcgttgttatcttccaccagcgtgtagtcatacgctcccatattgacgtagccgctgcctgccagactgaactgcgcattgttttgaaactgcgtgggatcagctgcgaaatcaaccactttaatgcctgtgcttgtcggctcaccaatccctgtaatggagttaaccaccacagttgtgttgccagcagtattaccgttcatcaccaattgatcgcttacgctgtcatcgccgtttaattcgctatcgagcagtagcgtaccgccgccggtataatcaccgtttaccgtcagcgtatcgccagcgacgccattttgcaggctaaccgcaccggacgtattggtcagattgccattaaccgtcacgttggaaagataagtcaggctgtcagtttcaaggttggtattaagctcacctgtcaacgtcacaccatcggtggcattcaccagcgtcccatcgccgttaaatagactggcattaagggcgacggaagtatcctgcccggtcaggcgcaaaaccgtaccatcgctgatgtcgatagtgccgctggaaatagcatcaatactctgaatatcctgatccgcgccagtaacgaacgttgccccatcaccaacccacagactgctagcataaggaaggatatcagcaacatcacctttcagggtgccttcttcgacacgtaccgcgctctgcgttgtaccgctggcggtcagctccagtgtaccagcccccgttttagtcaatgtgctaccctcatcctgatgctgcccgctgctgtcagccatcagtgcgccccactgcgtgtctacccccgcatcaactgccacttcaccgtcggcgcgcatttcaatatcacgtccgtggcctgccgcatcactacgcgtgtcaacgtcggaggtaatctccatcacgctttcttgttgcttatcggtaaagataacctggcggttatagtgggtatctccaagctggctgttgtcgctcaccatcagcgtaccggaggcgatttgtgttgtgcccaaataactattattgtttgccagacttacctgcccgtcgctcgcatcgaccaccacgtagacgccatctttcccgtcgccgccgatatgcaaattgtcgccacctgcaagatctaccacatcctgactgccgataaccgttccgctgctgccactgacttcaaggccatcgttgtaacttgtgccgctctgccaggtggagaaatcagagagatcgagcacaccgccgtttaacacgatgctctgcggatcgtcctggagagcggtaagatctgccgcgtcgccttccaggctaagcaccgcaccatcatcaacgactatatcgccggttagcgccatgctctgcgcccctgccagcacgtagctgccgttttgcgcaatggtgagctgaccagcaccttcgatgatgccagcaaaactgccctgattaacagtaacgttgccaccagcatcgatatttaaagtgccattctgaaagcccgtcaatgcgtgcacaaaagtttgttgggtgctgccaacgtttagctcagcctgattctgatactgatcaatactccctatcgtcagaccgtagcagtcttgcggatcgtcctggcaatgcgtatcgccgacattcatcagggagttgctgcggcccagggtaacttcaccgttttcaatctgcatctcaccagtaaagtcattgttatctgcattaagtaccagatcgccggaacctgttttggtgattaacccggtaccagcaatagagtcaacagctccgtcattctctgtattgccaataaccagcgtttttccgtcggcaatatcaaaggtaacttcacttaagccgagatacataaagccacccgccgcagaggaaggaccatctccatagcctgctgcgctattgttctcatcgactaacacgcctccgttctggctgtagctgtcatcaacagaaatatcaataagatagggagccgtcacgctattggtatatatcgccccgccataaccttcggcagtgttatttgtaaaggcagtgttatttactatcgtataaccactaggatgcttgctgtcgctattattatcggtaacatcgattgccccgccatcgccatcactgtaacttgtacttgtatatgcctggttgttatcaaaaataacatcacttaaataaacgtcattattaatggtataaattgcgccacctttgccatcattagcgatgttattgcgaaacatggcgttagtgacacgtaaatcgacggcaccagtatcgttagtaccagaagaatagattgcgccaccatagccgcctgcgacgttaccggaaaaaataacatcagtaagattcagcgtactgttttctttagcaaatatggccccgccgttattatattctcctgtaacggtgttattggcaaacagagtcattccagtttcattttctggtaatagactaaattccgctccttgttgcaaaaatacggccccaccgctggcgttattggtcatatcgctaaaaaccagccattgcccatcagcgatactccagtcctgcgtaatgccactaaggctttgcctgctggcctgacaactcgctttgacatcatatccctggcaactatcagtgaccgccgcgacaccgttagcagagaaaagagatgcaatcatactcgggagtaaagataaatactccttgcgtagaaagataatccgcatattaatctaaccatcattttctataagacggcgtatttaatcgcattatacgatatggaatatctttcttttgtaaattgttcaacccggtgcaatggctattttgttattatttgatgaataatatcagtgcgtcataattcaagttaataaccttcagggatatcagttatatttaaactaaattaaagtcatgaataattttcttataatataaggtaaattaacaaaatggcttagcatttaacaataaccgaatagaaaacaaccatttcgccatcaacaatctcttacattcgcttatatattgaccacaactgatacatcagattatgtgatgactcgtgcttagatcaatttttgcaatcattagcaaaaagattaataagccatctatatcaatttatctaacctattatgccgttcaagaaatcgccgaacagttatttttaacaaatttttctcttcccattgactttcccggacaccttgtctgacctaaggtgcgcgaaagccactttttccttcctgagttatccacaaagttatgcacttgcaagagggtcattttcacactatcttgcagtgaatcccaaacataccccctatatatagtgttctaagcagcttcccgtactacaggtagtctgcatgaaactattgcggaaagaattccaaaaacaggtacgacatacatgaatcagaatctgctggtgacaaagcgcgacggtagcacagagcgcatcaatctcgacaaaatccatcgcgttctggattgggcggcagaaggactgcataacgttagcatttcccaggtcgagctgcgctcccacattcagttttatgacggtatcaagacctctgacatccacgaaaccattatcaaggctgccgcagacctgatctcccgtgatgcgccggattatcagtatctcgccgcgcgcctggcgatcttccacctgcgtaaaaaagcctacggccagtttgagccgcctgcgctgtacgaccacgtggtgaaaatggtcgagatgggcaaatacgataatcatctgctggaagactacacggaagaagagttcaagcagatggacacctttatcgatcacgaccgtgatatgaccttctcttatgctgccgttaagcagctggaaggcaaatatctggtacagaaccgcgtgaccggcgaaatctatgagagcgcccagttcctttatattctagttgccgcgtgcttgttcagcaactacccgcgtgaaacgcgcctgcaatatgtgaagcgtttttacgacgcggtttccacatttaaaattagcctgccgacgccaatcatgtccggcgtgcgtaccccgactcgtcagttcagctcctgcgtactgatcgagtgcggtgacagcctggattccatcaacgccacctccagcgcgattgttaaatacgtttcccagcgtgccgggatcggcatcaacgccgggcgtattcgtgcgctgggtagcccgattcgcggtggtgaagcgttccataccggctgcattccgttctacaaacatttccagacagcggtgaaatcctgctctcagggcggtgtgcgcggcggtgcggcaacgctgttctacccgatgtggcatctggaagtggaaagcctgctggtgttgaaaaacaaccgtggtgtggaaggcaaccgcgtgcgtcatatggactacggggtacaaatcaacaaactgatgtatacccgtctgctgaaaggtgaagatatcaccctgttcagcccgtccgacgtaccggggctgtacgacgcgttcttcgccgatcaggaagagtttgaacgtctgtataccaaatatgagaaagacgacagcatccgcaagcagcgtgtgaaagccgttgagctgttcagcctgatgatgcaggaacgtgcgtctaccggtcgtatctatattcagaacgttgaccactgcaatacccatagcccgtttgatccggccatcgcgccagtgcgtcagtctaacctgtgcctggagatagccctgccgaccaaaccgctgaacgacgtcaacgacgagaacggtgaaatcgcgctgtgtacgctgtctgctttcaacctgggcgcaattaataacctggatgaactggaagagctggcaattctggcggttcgtgcacttgacgcgctgctggattatcaggattacccgatcccggccgccaaacgtggagcgatgggtcgtcgtacgctgggtattggtgtgatcaacttcgcttactacctggcgaagcacggtaaacgctactccgacggcagcgccaacaacctgacgcataaaaccttcgaagccattcagtattacctgctgaaagcctctaatgagctggcgaaagagcaaggcgcgtgcccgtggtttaacgaaaccacttacgcgaaagggatcctgccgatcgatacctataagaaagatctggataccatcgctaatgagccgctgcattacgactgggaagctctgcgtgagagtatcaaaacgcacggtctgcgtaactccacgctttctgctctgatgccgtccgagacttctagccagatctctaacgccactaacggtattgaaccgccgcgcggttacgtcagcatcaaagcgagcaaagacggtattttgcgccaggtggtgccggactacgagcacctgcacgacgcctatgagctgctgtgggaaatgccgggtaacgatggttatctgcaactggtgggtatcatgcagaaatttatcgatcagagcatctctgccaacaccaactacgatccgagtcgcttcccgagtggaaaagtgccgatgcagcagttgctgaaagacctgctcaccgcctacaaattcggggtcaaaacactgtattatcagaacacccgtgacggcgctgaagacgcacaagacgatctggtgccgagtatccaggacgatggctgcgaaagcggcgcatgtaagatctgatattgagatgccggatgcggcgtaaacgccttatccggcctacggctcggtttgtaggcctgataagacgcgccagcgtcgcatcaggctccgggtgccggatgcagcgtgaacgccttatccggcctacggctcggatttgtaggcctgataagacgcgccagcgtcgcatcaggcacaggatgcggcgtaaaatgccttatccggcattaaactcccaacaggacacactcatggcatataccacctttagtcagacgaaaaatgatcagctcaaagaaccgatgttctttggtcagccggtcaacgtggctcgctacgatcagcaaaaatatgacatcttcgaaaagctgatcgaaaagcagctctctttcttctggcgtccggaagaagttgacgtctcccgcgaccgtatagattaccaggcgctgccggagcacgaaaaacacatctttatcagcaacctgaaatatcagacgctgctggattccattcagggtcgtagcccgaacgtggcgctattgccgcttatttctattccggaactggaaacctgggtcgaaacctgggcgttcagtgaaacgattcattcccgttcctatactcatatcattcgtaatatcgttaacgatccgtctgttgtgtttgacgatatcgtcaccaacgagcagatccagaaacgtgcggaagggatctccagctattacgatgagctgatcgaaatgaccagctactggcatctgctgggcgaaggtacccacaccgttaacggtaaaactgtgaccgttagcctgcgcgagctgaagaaaaaactgtatctctgcctgatgagcgttaacgcgctggaagcgattcgtttctacgtcagctttgcttgttccttcgcatttgcagaacgcgaattgatggaaggcaacgccaaaattattcgcctgattgcccgcgacgaagccctgcacctgaccggcacccagcatatgctgaatctgctgcgcagcggcgcggacgatcctgagatggcggaaattgccgaagagtgtaagcaggagtgctatgacctgtttgttcaggcagctcaacaggagaaagactgggcggattatctgttccgcgacggtagcatgattggtctgaataaagacattctctgccagtacgttgaatacatcaccaatatccgtatgcaggcagtcggtttggatctgccgttccagacgcgctccaacccgatcccgtggatcaacacttggctggtgtctgataacgtgcaggttgctccgcaggaagtggaagtcagttcttatctggtcgggcagattgacagcgaagtggacaccgacgatttgagtaacttccagctctgatggcccgcgttaccctgcgcatcactggcacacaactgctgtgccaggatgaacacccttcccttctggcggcgctggaatcccacaatgtggcggttgagtaccagtgtcgcgaaggttactgcggctcctgtcgcacacgcctggttgcaggtcaagttgactggattgccgaaccgttagcctttattcagccgggggaaattttgccctgttgttgccgggcaaaaggcgatattgaaatcgagatgtgaattggttgtagtgccagatacaacgcttatgcgtcttatctggcctacaacgattacatggcgtagtaatacgctttcacctgctcccagtccgctttggggattggctccagatatttttccagctggcggaagtcatgattaatcgctttatcgcgacgcaagcggcgacgacttttctccaggtcaagaaaaccagcttctgcattaccttctgttttcacatagatatggcgaacataacaacagccatgctgacgattaatgctatgcattttcttaaacgccagcgccactgctttcaacatggcttgccgtacttcgtcagaataagggcttactgcatgctgggcataccagtcagcaatgctgatgaaccccgccatatcttcagtcaccagcaacgctcgccattcaccctcaattttcaccgcttcaccaaaaacgatcttcggcacgatgacaccggcccgttccagttctttaattaccgcaacctcacggacaatcgttggtcggccgaacggataacgtacggaatgaaacagatgatgcgtcatgcgctttacatacagctttttgccgttgcgctcgacgcattgcaccccgctcataccattacggcgatagttaggctcttcaacccagtcgccctctgttgcccaccagtgattaaattcgtcgtactttgcactaactgccataccctatcgcctgtcatttttattaacgacaatgactataggtggttacctgaggaaaatcttaatgaaacgtgtcgtattaatgaatttcttttgccactactagcttgacaccgcttttacccttcatttgcagcgcatagattccaccagccactaccactaatagtgcgcccagcagataaaatgtgaatttaatcaggcggatacagcgatgaattttattcgacagggattaggcatcgccttacaaccagagttaacgctgaaaagcattgcaggtgaattgtgttccgttcctctcgaaccaactttctatcgacagattagcttgctggctaaagaaaagccggtagaaggcagtccactgtttttactacaaatgtgcatggaacaattagtggcgattggaaaaatttgatatgagacaggatggcgcatgaacgccatcctgcagtaacattactctttattaagaaattttactgccttatcagggaaatcagtaaacagcccatttacacccgctttgttatacagagcatcatataactgattcacatcaggagtgtattcaggcagtttatcactccgcacggtataaggatgcactaccagtttattctgctgagcatcttgcaccatgccagtgagtttgatattacccggctggcttgtctcctcaatcaacatatggtaatccggaccaataccatctgcatattccgccacctgtttcatggcacccggcttaaacatccagtcgtagttgtaattaacccagcttccatccggctgtttctgctgcgtttcattccagtcggtataggcaatcagctgtaccagattgagctccatgcccattttgggttccagctcattcttaatacgcttcagctcatcagcatcaaaacattgcaaataaactttatcgtctttaccggtgtaaccatatttcttcagcacttccagcgtttttgccgcaatatccttcccttcctgatgatggaaccacggcgctttgatttctggataaataccgatatttttcccggtagagtgatttaacccctgaacaaattcaatctcttcttcaaaggtgtgcacccggaagtcggacttacccattgggaaacgccccggataagtctgcacttttttaccgttttcaatatcgaaaccttcggtaaatttcaagctcttaatttcatccagcgtgaaatctatcgcgtagtaacgaccgtctttgcgcgcccgatccgggaaacgatcggcaacatcagtaacacgatcgaggtaatggtcatgcagaacaaccagattgtcgtctttggtcatcaccaaatcctgttccagataatccgctccctgcgcatacgccatcgcttttgctggcagcgtatgctccggcaaatatccactggcaccgcgatgggcgatgactattttttcgttgctgtccgccgccattgcactgcttcccatgactatagtgctcatcatgatcgccatgctaaggtttttcagcgtcaatttcatgccattagcctccgttgcgttcttgcagtaattgttcatggcgacgtttttcgccaatcatcacaacaatcaacaagataaccgccagaatgctgccgccaatcattaccataaagccgccatcccagccgaagaagtccacggtgtagccaacaatcgcgctcgccgccacgctaccgcccaggtaaccaaacagcccggtaaagcccgctgccgtacctgccgcttttttcggtgccagttccagcgcatgcagaccgatcagcatcacaggaccgtagatcaggaagccgataacaatcatacaaatcatatcgacggttgggttacctgccgggttcatccagtaaacgatagtcgcgatggtcaccagtgtcataaagaaaacgccggttgccccacggttgccacggaagactttatcgttcatccagccgcacagcagagtgcccggaatacctgcatattcataaaggaagtaggcccaggaggatttatctagcgcgaaatgcttaacctctttcagataagtcggactccagtcgaggatgccgtaacgcagcagataaacgaacacgttggcgatggcgatataccacagcagtttgttcggcagtacgtactgcatgaagatttgcttcgccgtcagctcctgttccgctttttcgttatagtcgtccggataatcatttttgtactcttcgatcggcggcaagccacaggattgcggggtatcgcgcatcatcgcaaaggcgaataatgccaccagaatggcgcagaaagcaggcatatagagcgccgcatgccagtcattgaaccaggccatccccagcaggaacagcagcggcggaataccaccaccgacgttgtgcgcacagttccacacactcacaatgccgccacgttctttctggctccaccagtgcaccatagtacgaccacacggcggccaccccatcccctggaaccaaccgcagaggaacaacagtacaaacatcaccgcaatgctgctcgtcgcccatggcacaaagcccataaacaacatcactgccgccgccagaatcaaacctgcgggcaggaaaacgcgcggattgctgcgatcgcttacgctacccatgatgaatttgctaaatccataagcaatgctgatcccgctaagggcaaaacctaaatcaccgcgactgaatccctgctcaaccagataaggcatagcaagcgcaaagttcttacgaaccaaatagtaagccgcatagccaaagaatatccccaggaaaatttgccagcgcaatcgacgataagtcggatcgatctccgcggcaggtaagcgcgctttgtgtggcgctggtttaaaaatactcaacattgatagcctccgtggcccgtggtcttatttatgattaacagcctgattcagtgagagaacctgccgtttcttgagttgccgcgatgttaagaaaacattcataaattaaatgtgaattgccgcacacattattaaataagatttacaaaatgttcaaaatgacgcatgaaatcacgtttcactttcgaattatgagcgaatatgcgcgaaatcaaacaattcatgtttttactatggctaaatggtaaaaaacgaacttcagagggataacaatgaaaactcgcgacagccaaagtagtgacgtgattatcattggcggcggcgcaacgggagccgggattgcccgcgactgtgccctgcgcgggctgcgcgtgattttggttgagcgccacgacatcgcaaccggtgccaccgggcgtaaccacggcctgctgcacagcggtgcgcgctatgcggtaaccgatgcggaaagcgcccgcgaatgcattagtgaaaaccagatcctgaaacgcattgcacgtcactgcgttgaaccaaccaacggcctgtttatcaccctgccggaagatgacctctccttccaggccacttttattcgcgcctgcgaagaagcagggatcagcgcagaagctatagacccgcagcaagcgcgcattatcgaacctgccgttaacccggcactgattggcgcggtgaaagttccggatggcaccgttgatccatttcgtctgaccgcagcaaacatgctggatgccaaagaacacggtgccgttatccttaccgctcatgaagtcacggggctgattcgtgaaggcgcgacggtgtgcggtgttcgtgtacgtaaccatctcaccggcgaaactcaggcccttcatgcacctgtcgtggttaatgccgctgggatctgggggcaacacattgccgaatatgccgatctgcgcattcgcatgttcccggcgaaaggaagcctgctgatcatggatcaccgcattaaccagcatgtgatcaaccgctgccgtaaaccttccgacgccgatattctggtgcctggcgataccattagcctgattggtaccacctctttacgtattgattacaacgagattgacgataatcgagtgacggcagaagaggttgatattctgctgcgtgaaggggaaaaactggcccccgtgatggcgaaaacgcgcattttgcgggcctattctggcgtgcgcccgctggttgccagcgatgacgacccgagcggacgtaacgtcagccgtggcatcgtgctgctcgaccatgctgaacgcgatggtctggacggatttatcaccatcaccggtggcaaactgatgacctatcggctgatggctgaatgggctaccgacgcggtatgccgcaaactgggcaacacgcgcccctgtacgactgccgatctggcactgcctggtagtcaagaacccgctgaagttaccttgcgtaaagtcatctccctgcctgccccgctgcgcggttctgcggtttatcgtcatggcgatcgcacgcctgcctggctgagcgaaggccgtctgcaccgtagcctggtatgtgagtgcgaagcggtaactgcgggtgaagtgcagtacgcggtagaaaatttaaacgttaatagcctgctggatttacgccgtcgtacccgtgtggggatgggcacctgccagggcgaactctgcgcctgccgcgctgccggactgctgcaacgttttaacgtcacgacgtccgcgcaatctatcgagcaactttccaccttccttaacgaacgctggaaaggcgtgcaacccatcgcctggggagatgcactgcgcgaaagcgaatttacccgctgggtttatcagggattgtgtggtctggagaaggagcagaaagatgcgctttgatactgtcattatgggcggcggcctcgccggattactctgtggcctgcaactgcaaaaacacggcctgcgctgtgccattgtcactcgtggtcaaagcgcactgcatttcagttccggaagcctggatttgctgagccatctgccagatggtcaaccggtgacagacattcacagtggactggaatctttgcgtcagcaggcaccagcccatccttactcccttctcgagccacaacgcgtgctcgatctcgcttgccaggcgcaggcattaatcgctgaaagcggtgcgcaattgcagggcagcgtagaacttgctcaccagcgggttacgccgctcggcactctgcgctctacctggctaagtagcccagaagtccccgtctggccgctgcccgcgaagaaaatatgtgtagtgggaattagcggcctgatggattttcaggcgcaccttgcggcagctagcttgcgtgaactcggccttgccgttgaaaccgcagaaatagagctgccggaactggatgtgctgcgcaataacgccaccgaatttcgcgcggtgaatatcgcccgtttccttgataatgaagaaaactggccgctgttacttgatgcgcttattcctgtcgccaatacctgcgaaatgatcctgatgcccgcctgcttcggtctggccgatgacaaactgtggcgttggttgaatgaaaaactaccttgtagtctgatgcttttgccaacgctgccgccttccgtgctgggcattcgtctgcaaaaccagttacagcgccagtttgtgcgccagggtggcgtgtggatgccgggcgatgaagtgaaaaaagtgacctgtaaaaatggcgtagtgaacgaaatctggacccgcaatcacgccgatattccgctacgtccacgtttcgcggttctcgccagcggcagtttctttagtggcggactggtagcggaacgtaacggcattcgagagccgattctcggccttgatgtgctacaaaccgccacgcggggtgaatggtataagggagatttttttgcgccgcaaccgtggcagcagttcggtgtaaccactgatgagacgctacgcccgagtcaggcagggcaaaccattgaaaacctgtttgccatcggtagcgtgctgggcggatttgatcccatcgcccagggatgcggcggcggtgtttgtgccgtcagtgctttacatgccgctcaacagattgcccaacgcgcaggaggccaacaatgaatgacaccagcttcgaaaactgcattaagtgcaccgtctgcaccaccgcctgcccggtgagccgggtgaatcccggttatccagggccaaaacaagccgggccggatggcgagcgtctgcgtttgaaagatggcgcactgtatgacgaggcgctgaaatattgcatcaactgcaaacgttgtgaagtcgcctgcccgtccgatgtgaagattggcgatattatccagcgcgcgcgggcgaaatatgacaccacgcgcccgagcctgcgtaattttgtgttgagtcataccgacctgatgggtagcgtttccacgccgttcgcaccaatcgtcaacaccgctaccagcctgaaaccggtgcggcagctgcttgatgcggcgttaaaaatcgatcatcgccgcacgctaccgaaatactccttcggcacgttccgtcgctggtatcgcagcgtggcggctcagcaagcacaatataaagaccaggtcgctttctttcacggctgcttcgttaactacaaccatccgcagttaggtaaagatttaattaaagtgctcaacgcaatgggtaccggtgtacaactgctcagcaaagaaaaatgctgcggcgtaccgctaatcgccaacggctttaccgataaagcacgcaaacaggcaattacgaatgtagagagcatccgcgaagctgtgggagtaaaaggcattccggtgattgccacctccagtacctgtacatttgccctgcgcgacgaatacccggaagtgctgaatgtcgacaacaaaggcttgcgcgatcatatcgaactggcaacccgctggctgtggcgcaagctggacgaaggcaaaacgttaccgctgaaaccgctgccgctgaaagtggtttatcacactccgtgccatatggaaaaaatgggctggacgctctacaccctggagctgttgcgtaacatcccggggcttgagttaacggtgctggattcccagtgctgcggtattgcgggtacttacggtttcaaaaaagagaactaccccaccagtcaagccatcggcgcaccactgttccgccagatagaagaaagcggcgcagatctggtggtcaccgactgcgaaacctgtaaatggcagattgagatgtccacaagtcttcgctgcgaacatccgattacgctactggcccaggcgctggcttaaactcctttctgatgcccggtaagcatgtggttaccgggcatttttgcgtacacgattccgtgcccaatgtatgcgttgcaacgcagtgaaaattcctctgaaaacgtctcgcaaaggctgaaactggcagatgtcaaaggcctgggataaccgtaatgtcgcgtcatcataaatatcaggtgacggacaaccatgaccgaaagtacaacctcctccccgcatgatgcggtatttaaaacctttatgttcacacccgaaaccgcacgggattttctcgaaatacatttaccagaaccactgcgcaagctttgcaacctgcaaaccttacgcctggaacccactagttttattgaaaaaagtttacgcgcttactacagcgatgttttgtggtccgtggaaaccagcgacggtgacggctatatctactgcgtgattgaacatcaaagctctgcagaaaagaatatggcttttcggctaatgcgctatgccactgccgccatgcagcgtcaccaggacaaaggctatgacagagtcccgctggtggtgccgttgctgttttatcatggcgaaaccagcccttacccgtacagtctcaactggctggatgagtttgacgatccgcaacttgcccggcagttgtacaccgaagcttttctgttggtggatatcaccatcgtacctgacgatgagatcatgcaacatcggcgtatagctctgctggaactgattcaaaagcatattcgcgaccgcgatttaatcggcatggtcgacaggatcaccacgcttttggttagaggcttcactaatgacagccagctacaaacactgtttaattatctgctgcaatgcggcgatacctcccgtttcacccgttttattgaggagattgccgaacgtagtccactacaaaaggagagattaatgactattgctgaacggctacggcaggaagggcatcaaattggctggcaggaaggtatgcatgaacaagccattaaaattgctttgcgcatgctggagcagggctttgaacgtgagattgtgctggcgacaacccaactcactgatgctgatattccgaactgtcattaaaaggagagattaatgactattgctgaacggctgcggcaggaaggacatcaaattggctggcaggaaggtaaattagaaggtttgcatgaacaagccattaaaattgctttgcgcatgctggaacagggctttgatcgtgaccaggtgctcgcggccacccagctaagcgaagccgatctggcagcgaataaccactaattaacacaggcccacagccgatccccatgggcctttgatatcaataactaccttttatgcgtggcccatttttgccacttttaaacatcgccagtcgttgatccagggcatcgctgtagagcatcgtgtcaacgccaacagcgacaaagttcgctccccacgccaggcattgctgcgccatatcaggagccacagccagaaaaccagccgctttacccgcagcacggatccgccgaatactggtttcaataattcgctgcacttccgggtgcccggcgttatccgggtagcccaagctcgcagaaagatccgcaggtccaataaacacgccatcaatcccttcgacgtcgaggatttcgtccaggttatccagtgccgttttactttccacctgcaccaacagacaaaggctatcgttaacttgcgccatgtaattctcaatgcgtccccagcgcgcagcccgtgccacactggccccgacaccacgctcaccgtagggaggatagcgcgtggcagacaccacctgacgtgcctgttcggcagtatcgaccatcgggatcagtagagtttgcgcgccaatatccaggacttgtttaatcagcggtttactgccttccaccggacggatcacgggttggctggcatagggcgctaccgcctgtagctgatgataaagatcctgaatggtgtttggcgcgtgctccccgtcaatcagcaaccagtcataaccagaagtggcggcaatttctgccatataggcagtcgtactgcttaaccacagaccaatttgcacttcgcccttgcgtaaacgttctttaaagggattgcttaataatgcgttcatcgtgttccttaacctatttaatgatgtgccacgtcggtctgcgcaacagtgcgatttacacgcagagtgaaaataatcaggctaccgatgaccgccaccgctgccagcgtcagtaatcccgccgcatcgctggcaaataacgtttctgctttcacgcgcaggatcggggcaataaacccgcccactgcaccaaacaggtttacaaaaccaattcccgcagccagcgccgtaccggaaagcagttgtgtcggcatcgtccagaacactggctgcacggcaataaacccgatagctgcaacacacagcgctacgatcgccattactggagaaagcagcccggacagaccaataccaatgcccgccgccagtaatgtcagcgctgcgacattacgccgttcgccggttttatcggaatagcgcggaataagccaggtcccaaacaaggccgcaacccacggaatggcggtgaccacgctcgctgtaaagcccacttttgttcccagcaatgccgcaacctgggtcggcaggaagaaaattaatccgtaaaccgccacctgaatggtcaggtagataatcgctagttgccagactcggccattacgcagcgcatcgctcagccgagaagtcactttctgttgttcttcacttgccagttgattgataagcaacgttttttcttgtttactcagaaaacgtgcctgctccggtgtgtcatcaagccaaaagaatgtgaataccccagcaccgactgccaacaatccttcaatcacaaacatccagaaccagccgggatgccccataaatccatgcatctccaacagcgcgccggaaagcggacttcccagtgttaacgccagcggtgcgcccatatagaacagccccataatgctggcgcgattacgctgcggaaaccattggctggtgagataaatcataccagggaaaaatccggcctccgcagcacgaagcagagtgcgaactatcagaaatttcgcttcagtatcggcccatgccatggctgcgctaagaaatccccacagcagtgttgtcgtaccaatccaggttctggcccccagtttgcgcatcaaaagattcgccggaacacccagaaacgcatataccacaaagaaaatgcctgctcccagcgcataagcttcattactcaacccggtatcaatctggtaggtctgtttggcaaaaccgatattgctacggtcgagaaacgccagcacatacagcgccaacataaacggaattaaacgcacacggtttttcttcaccacggcgtcaagcaaagcggtgctcataaaaagctccttagaatatgtgggcgttaccgttgtcacagcaacgcccggagtgattagtggctgtaggggcgtttcaaattgcagtcatgattgagttcgacgccaaaaccgggtttatcaagcacacttttatgaatacgaccattcaccggaaccggctcattgagcagaatcgggtcaaactgcggacgcatcgtactacaatccgggctggtcatcaggaattcgctgaatggcgtattggtgaaggtgatcaccgcatggtgagagtaaacagagctaccgtgcggcaccaccagttgccccctggatttggcgattgcggcaatttccaccagcgtggttaaaccaccgcaccagccaacatccggctgcataatgtcgataccggtttcactaagcgtacgaaaagattgcagtgtgccgtggtgctcaccgctggtgaccatcattccgactggcgcgttgcgtttcagttcgcgataactttcatactgctgtggcggcaggcactcttcgatccatttcaggttatagggcgcgcaagcgtgggccagtttggtcgcatagttcacgtcctgactcatccagcagtcgagcattaaccagaaatcctcaccgcatttttcacgcatatccgcgaccatagcggcatctttgcggatccccgcatcgccatcatgtggcccccagtgcgtcggcattttgccaccgataaagcccatctcttttgccagatccggacgcgcacctgtggcgtagaactgaatctcatcacgaacagcgccgcctaaaagtttataaaccggaagcccgaccactttgccgaacagatcccacagagccagatcgacacaagaaatcgtattcatcaccaggccaccagagccggagtaatacagggtggcactgagcatttgatcgtggatcagtttgatatcactgacacatttaccctcaatgaaacggttaagatgtttttcgacaataaaacagcccatttcaccggctgtgctaacggcgaatccggtctggccgttttctgcttcgacttcaacaaccaacgtgccaagaacgttaatgccaaaactctggcgactctgctcgtaatcgcggtatttactcatcggggtggcaatatgatcgtctatccagtgattcgccccctggtcgtgataatcaccgccgccagcgcctttttctgctgtcgcaccgccagtaaaccaggcgcgaacctgtttaatttttggtagggtcatgatgttctccattgttaactggcttgtaagtcaaagggacttttccatcccaacagacgactaatatccctggcgcaggcaatggccttgcccgccagataatcacggtattcttcattgatttgtaagcgggtaccgaccacgctgatcgcagcggtaagctcgttattggcgttaaacaccggcgcagcgacacaacggacatcggcgtaatcttcgccgttgtcatagctccagccctgacggcgaatacgcgccagttcttcgtgaagttgctgtggatgagtaatcgttgtgggtgtcgcctgctcccagaccagcccttcgataatactttgctgtaccgctgcaggttgccaggcaagcaggcatttacctattccggagcgataaaggctaaggctttttccttcatgggaacgcacgctgatagtggcactactctccactttcaaaatgtaataagcgctgccgttatcaataatccccaggtgacataacagcccggtggtatccatcagttgcgtcaaacgcggtcgagccagttcccggagatccatcttgcttaacgcatgaccggaaagctccaccagcctggtccacaaacaaaaattttcctggtgatcaaggctaagaaaacgctgacgcctgagttcattaagcagcaaataggccgtgcttttagggattcccaatgtgtcaatgatcgtcgcagcactacaggggccaatgcgggcaatcaaattgagaatatcaatagcccgtgtcagggcgggaactttgctactttccaacatactggactccagtcttagatactggaatcagtctcgttgctcagggggagtaaaattgtgaagcgcatcaaatcccgctcctcgtccagcagactggagaaattacgcacaaatttgtgaatcagcgcacggattttttcttattgagtacaacaggttggacaaattttgccggagggggaatgtgccggtgcagtaaaccggcacagagtggcggaatcagacagataaggtcatggactcaacaacctcaatccagccatgctcactggcgatatcctggccgtttaaccaacggcgcagcatattcagtgccatcattgcgcacacttcctgacggatagccaggctgtagcgcgtagtgctgaaacgcacacgcagagcgaaagtgccgtctggcgtggctagcgcaaagttgagatgctcgttctcgaaaccgctaacagccagtgccagcccggcaaaatggttggcccgccgttctgtaatccagtgcgcagtttgcgccagggtttcctcctgactaggaaccacttcacacgccagcaatggagcacctgcgcgagaaagttgcaaagccaataaaccaccggtgaattgctcgctcaacgtcaggctgaactggcggttttgcaattcgcgactgatctgcgcgggcagtccttcagtgccttcgaaaatcacgctctgtccggcaacacgtttaacatccagccacagtttttccatcgcctgttgctcgcttgccggtccggtgagtttcagttcgatgataggcatactggagcgatagcccattgttacgcccggcggcagttgtagagtgtccaggctttgtgccagatcgctttcgctacgaccaaaagtagtcaaacgcagacaaaccggcggctgcggtaaagaaaaacgctcgcgcaggcgcggcaggatttcgtgctcgaccatcaccttaaattcactcggtacgccgggagtaaagaacatcaggcaacgattaagctgcacggcaaaaccacaggcggtgcctaccgggttattgataaattcagcactggcaggcagctccgcttgtttacggttgctcggtgccattactcgtccacgttcgtggaaatagcgttccatctctttgagccaggcttcatgcagcaccaggccttcaccttttgctgtcgcagcggcgagtgcgcttaaatcatcgctggtcggtcccagcccgccgttaacgatcagcacatcggcgtgctgactacgttcgcgaagaatggtgactaagtcatcaaggttatcccccaccgtattgcggcgagataatggcaacccctgatgaaagaaaaaatcggccagccaggcagcgttagtgtcaacgatttgcccgtgtaacacttcatccccggtggataacatttccacttttaacatggttatctcctgcttttgttatcgaatcactataacgcaaagggagataaggcgtagtaagaaactgaatggcgcgacagaatgccgcgccggaagggatcagaaactggcgttaaccccaacatacgggccgtcagccacggcgttgtcgcggttaccgtctttaccgctcagattcaggtagcgataacccgcctcaatactgactggacgcataatggtgtaacgcgcgccagcattcgcttcttcataactttgaataccgctggagaggctatccggagagtagtaatactcgccaaacaaacggaagctgttgccaattttccactgcaaaccacctcctaccgctgcggcataaccttcatcgccgtaattcgggttggtgtaaacgccttttccgccaacggtcgccattaacggcccgagaggcagattcaaccccagccccacgccagcgacatcaccgtcgtcgtcgttatgtgtccagttaccgcttaacgccaggcccgtcgtttcagtcccaaaaccgacaccaatattggtgtattctttacccgcctgaccgctgatgctcattgcattgacgcttgcagaaaccaacagcattccggccagacctgctagcgcaatttttttcattatcccctttcccacaagcaattaatcaaaattcccaaagctgcgggattgtactgcctggcacagaggattcaatgagcgaaaaaaaggatctagtcacttattgtaactaaatacttcttaaataattaaatgccgaaaaaataaacacactttatcgatacacacaaaaataataataagtacagttatcatcgcaaaagagattactgtcactttcacatatttgtgagttaccgtattctcatggtttctttttatttataaggaatatccctgtgcgacaacggactattgtatgccctttgattcaaaatgatggtgcttatttgctgtgtaaaatggccgacgatcgcggcgttttccccggtcaatgggcgattagcggtggcggcgtggagcctggcgaacgaattgaagaggcactacgccgcgaaattcgcgaagaactgggagaacagctgcttttgacagaaatcacgccgtggaccttcagcgatgatattcgcaccaagacgtatgcagatggtcgcaaggaagagatttatatgatttacctgatttttgactgcgtttctgccaaccgagaagtgaaaataaacgaagagtttcaggactacgcgtgggtaaaacctgaagatctggtgcattatgatttgaatgtcgccacccgaaaaacgttacgtttgaaaggtcttctgtaacaatgatgacagccattactggctgtcagattgaaaatttagtggttaacgaattccccatccagataaactttgcctttttccacatgcatgactaaaccatccagataatcaggtttaaatgtcgcgtcacgcttatctttagcaatatatgtcaggcaatgattatgggtgaaaataacgatatttttatcaggcgctttgctttgtaagtccttaattgcactataaatctcattaccgcactgaagaagtcgtttatctaccgtcaattttttacccgcactaaaccaggtagcgctctgaatggtccggacggtattactggaataaagatcgaaatcagggatatcagcactaaaagcgttgcccagttcacgggcatcctgggtacctttaaccgtaatacctgttttatcactcaagcattgattggtactacggtcgcaacgttcagcatgacgaaacaaaacgacaaccgggtgctgctgtgccagtctggccagtgttttattgtcgatacgtggcaaaccattgctactccaggcggcatgagtacccagtccggcaattgcagcgagcgccagtaaaatgatgatatattttttactcttcaagctagagcggcaaaaagctaacacgtaaactccacctatagacaagcgcaaccagacaattaccgtgaaattgagctacatttctggcgataattcgcagttggtgtaatattaaaaatcctacgatgtcggcaaaatgcctcaaaattttgccaaatgcaaagcctaaataagaaaaaatataaaaatttcaatatttacgtctaatattagtttcttaaggttaagttaatattctatccttaaaatttcgctccaaatggcaaaatatacacaacactctttatagcaaatataagtggacaggtattcaatggcggaaggaaaagcaatgagtgaatttttgccttttagccgaccagcaatgggcgtggaggaactcgctgcagttaaagaggttctcgaatccggttggatcacaaccggtccgaagaatcaggcgcttgagcaagctttttgccagttgacgggaaatcagcatgccatcgcggtcagtagtgccaccgccggaatgcatatcacgctaatggcgttgaaaattggcaagggcgatgaagtgattacgccttccctgacctgggttagtaccctcaatatgatttccttgttgggtgcaacgccggtaatggtggatgtcgaccgcgatacgctgatggtcacgcctgaagctatcgagagtgccattacgccacgcactaaagccatcattccggtgcattatgccggtgcgccagcagatattgacgccattcgcgccattggcgaacgttacggcatcgcagttatcgaagatgctgcccatgccgtcggtacgtattacaaagggcgacatattggcgcaaaaggtaccgctatttttagttttcatgccattaaaaatattacctgtgctgaaggtggcctgattgtaactgataatgaaaaccttgcccgccagctacggatgctgaaatttcacggtctgggtgtcgatgcctatgacagacaaacctggggccgtgcaccgcaggctgaagtcttaacaccgggctataagtacaatctgaccgatattaacgccgcgattgccctgacacagttagtcaaattagagcacctcaacacccgtcggcgcgaaattgcccagcaatatcagcaagcactggcagctctcccctttcagccattaagccttcccgcctggccgcacgttcacgcctggcatctgtttattattcgtgtcgatgaacaacgttgtggtatcagtcgcgatgcgttgatggaagcgttaaaagaaagaggcattggtaccgggttacatttccgcgccgctcacacacaaaaatattatcgcgagcgttttcccacgctgagcttaccgaataccgaatggaatagcgaacgcatctgttctttgccgctgttcccggatatgactaccgccgatgccgaccatgtcatcacagcccttcagcaactcgcaggacaataagccatgtttgaaatccaccctgttaagaaagtcagcgtggttattcccgtttataacgagcaggaaagcttaccggaattaatcaggcgcaccaccacagcctgtgaaagcttggggaaagagtatgagatcctgctgattgatgacggcagtagcgataattccgcgcatatgctggtcgaagccagtcaagcggagaacagccatattgtgtctattttgcttaaccgcaattacgggcaacatagtgcgattatggcgggattcagtcacgttactggcgacttaattattacccttgatgccgatctccagaatccgccagaagaaatcccccgcctggtggcaaaagccgatgaaggttacgacgtggtagggactgtacgccagaaccgccaggacagctggtttcgtaaaaccgctagcaagatgattaaccggcttattcagcgcaccactggcaaagcgatgggtgattacggttgtatgctgcgcgcctatcgccgtcatattgtcgatgcgatgttgcactgccatgaacgcagcacctttatcccgattctggcgaatatcttcgcccgccgtgccattgaaattccagtacatcatgccgagcgtgagtttggtgaatccaaatacagttttatgcgcctgattaatttgatgtacgacctggtgacctgccttaccacaacgccgctacgtatgctgagtctgctcggcagcattattgcgattggaggttttagcattgcggtgctgctggtgattttacgcctgaccttcggaccacaatgggcggcagaaggcgtctttatgctatttgccgtgctgtttacttttattggcgctcagtttatcggcatgggattactcggtgaatatatcggcaggatctacaccgatgtccgcgcccgcccccgctattttgttcagcaagttatccgtccatccagcaaggaaaatgaataatgaaaaccgtcgtttttgcctaccacgatatgggatgcctcggtattgaagccctgctggctgccggttacgaaattagcgccatttttacccatactgataatcccggtgaaaaagccttttatggtagcgtggctcgtctggcggcggaaagaggcattccggtttatgcgccggataacgttaatcatccgctgtgggtggaacgcattgcccaactgagcccagatgtgattttctctttttattatcgccatcttatttacgacgaaattttgcagctcgctcccgcaggtgcatttaatctgcatggtagcctgttaccaaaatatcgtggtcgcgcgccgctgaactgggtgctggtcaacggtgaaacggaaactggcgttacattgcaccgaatggtgaaacgtgccgatgccggggccattgtggcgcaactgcgcattgccattgcgccagacgatatcgctattacgctgcatcataaattgtgccatgccgcgcgccagctactggaacagacattacccgccattaaacacggtaatattctggaaatcgcccagcgcgaaaacgaagccacctgttttggtcgcagaacgccggatgacagtttccttgaatggcataaaccggcatccgtactgcacaacatggtacgtgccgttgccgatccgtggccgggtgccttcagctatgttggcaatcagaaattcaccgtctggagcagccgtgttcatcctcatgccagcaaagcacagccggggagcgtgatttctgttgcgccactgctgattgcctgtggcgatggcgcgctggaaatcgtcaccggacaggcgggcgacggcattactatgcagggcagccaattagcgcagacgctgggcctggtgcaaggtagtcgcttgaatagccagcctgcctgcaccgcccgacgccgtacccgggtactcatcctcggggtgaatggctttattggcaaccatctgacagaacgcctgctgcgcgaagatcattatgaagtttacggtctggatattggcagcgatgcgataagccgttttctgaatcatccgcattttcactttgttgaaggcgatatcagtattcattccgaatggattgagtatcatgtcaaaaaatgtgatgtcgtcttgccgctggtggcgatagccacgccgattgaatatacccgcaacccgctgcgcgtatttgaactcgattttgaagagaatctgcgcattatccgctactgcgtgaagtaccgtaagcgaatcatcttcccgagtactagtgaagtttatgggatgtgtagcgataaatacttcgatgaggaccattctaatttaatcgtcggcccggtgaataaaccacgctggatttatagcgtaagtaaacaattacttgatcgggtgatctgggcctatggcgaaaaagagggtttacagttcaccctcttccgcccgtttaactggatgggaccacgactggataaccttaatgcagcgcgaattggcagctcccgcgctattacgcaactcattctcaatctggtagaaggtagtccgattaagctgattgatggcggaaaacaaaaacgctgctttactgatattcgcgatggtatcgaggcgttataccgcattatcgaaaatgcgggaaatcgctgcgacggtgaaattatcaacattggcaatcctgagaacgaagcgagcattgaggaactgggcgagatgctgctggcgagcttcgaaaaacatccgctgcgccatcatttcccaccgtttgcgggctttcgcgttgtcgaaagtagcagctactacggcaaaggatatcaggacgtagagcatcgtaaaccgagcatccgcaatgcccaccgctgcctggactgggagccgaaaattgatatgcaggaaaccatcgacgaaacgctggatttcttcctgcgcaccgttgatcttacggataaaccaagttgacctaagatcttacggataaaccatcatgaccaaagtaggcttacgcattgatgtcgatacctttcgtggcacccgtgaaggcgtgccgcgtctgctggaaatcttgagtaagcataatattcaggccagcatttttttcagcgtcggcccggacaatatgggccgccatctctggcgactggtgaagccacagtttttgtggaagatgctgcgcagtaacgcggcaagcctttatggctgggatattttactggcaggtacggcctggccaggtaaagagattggtcatgccaatgccgatatcattcgtgaagcggctaaacatcacgaagtcggcctgcacgcctgggatcaccatgcctggcaagcccgtagcggtaactgggatcggcaaacaatgatcgacgatattgcacgcggtcttcgcactctggaagagattatcggtcaaccggtaacctgttctgccgctgcgggctggcgtgccgaccagaaggtgatcgaagcaaaagaagcgttccatttgcgctacaacagcgattgtcgtggggccatgccgttccgtccattgctcgaaagtggaaaccctggcactgcgcaaattccggtgaccttacccacctgggatgaagtgattggtcgggatgtgaaagcagaagattttaacggttggttactcaaccgcatcctgcgagataaaggcacgccggtttataccattcatgcagaagttgaaggctgcgcttatcagcataattttgtggatctcctcaaacgcgcagctcaggaaggcgtgacattttgccctttaagcgaactgttaagtgagacgttgccgctcggacaagttgttcgcggaaatattgccggacgtgaaggctggctgggttgccaacaaattgcgggtagtcgctgatgaaaagcgtacgttaccttatcggcctcttcgcgtttattgcctgctattacctgttaccgatcagcacgcgtctgctctggcaacccgatgaaacgcgttatgcggaaatcagtcgagaaatgctggcatccggcgactggattgtgccccatctgttagggctacgttatttcgaaaaacccattgccggatactggattaacagcattgggcaatggctatttggcgcgaataactttggtgtgcgggcaggcgttatctttgcgaccctgttaactgccgcgctggtgacctggtttactctgcgcttatggcgcgataaacgtctggctctactcgccacagtaatttatctcagtttgtttattgtctatgccatcggcacttatgccgtgctcgatccgtttattgcattctggctggtggcgggaatgtgcagcttctggctggcaatgcaggcacagacgtggaaaggcaaaagcgcaggatttttactgctgggaatcacctgcggcatgggggtgatgaccaaaggttttctcgcccttgccgtgccggtattaagcgtgctgccatgggtagcgacgcaaaaacgctggaaagatctctttatttacggctggctggcggttatcagttgcgtactgacggttctcccttggggactggcgatagcgcagcgggagcctaacttctggcactattttttctgggttgagcatattcaacgctttgcactggatgatgcccaacatagagctccgttctggtactacgtgccggtcatcattgccggtagcctgccgtggctgggattactccccggtgcactgtacacaggctggaaaaaccgcaagcattccgcaaccgtctatttgttgagctggacgataatgccgctgctgtttttctccgtcgctaaaggtaaattgcccacctatattctttcctgctttgcatctctggcaatgctgatggcgcattacgctttgctggcagcaaaaaataatcctctggcgctgcggattaatggctggattaacatcgcttttggcgtcactggcattattgccacatttgtggtctccccgtggggaccaatgaacacgccggtgtggcaaaccttcgagagctataaagtcttttgtgcctggagcatttttagcctatgggcatttttcggctggtacaccttaacaaacgtcgaaaagacctggccttttgccgcgctttgcccgctggggctggcgttgctggtaggatttagtattcctgacagagttatggaaggaaaacatccgcaattttttgtcgagatgacacaagaaagtcttcagccaagccgctatattcttactgatagcgtcggtgttgccgcaggtctggcatggagcctgcaacgcgatgacatcatcatgtatcgccagacaggtgagttgaaatacggccttaattatccggatgcgaaagggagatttgtcagcggtgatgagttcgcaaactggcttaatcaacatcgtcaggaggggattattactctcgtgcttagcgttgaccgcgatgaagatatcaacagtctcgccattccgcccgcagatgccatcgatcgtcaggagcgtctggtgctgattcagtatcgtcccaaatgatctggctaacattagtctttgccagcttgcttagcgttgccgggcagttgtgtcagaaacaggcaacctgctttgtggcgataaacaaacggcgcaaacatatcgtgctgtggctgggactggcgctggcttgtcttggtcttgccatggtgctctggctgctggtcttgcagaacgtaccggtaggcattgcttacccgatgttaagtctgaattttgtctgggtgacgctggctgcagtaaaactgtggcacgaaccggtaagcccgcgtcactggtgtggggtggcgttcattattggcggcattgtgatcctcgggagtacggtgtaatgggcctgatgtggggattattcagcgtcattattgccagtgttgcgcaattaagcctgggttttgcggcgagtcatctgccgccgatgacgcacttatgggattttatcgcggctctgttagcttttggcctggatgcccggatactgttactcgggctgctgggttatctgctttccgttttttgttggtataaaacgcttcataaacttgcgctaagcaaagcctatgccttgctcagtatgagttatgtgctggtatggattgctagtatggtacttcccggctgggaagggacttttagcctgaaagcactactgggagtagcctgtattatgagcgggttgatgctgattttcctgcccacgacaaaacaacgttactgagttttccctgccactttacactgccgttcccactcatcggggctataactgcttgcgctgaggactttcaccgtatgcagcttttcacgattaatacaataaagcgcattctgcaaagggctgagtaaatcccccactttcacggcgaagtcactcttcacttcggcgatcatttttatcgcgccgccagcatcgcagagcataagtacatgtctgttatcttgtttattgcagcagctttttttgaccagccattccattgcattatcctgtttgctaagagttttcacatcaatttacagattaacagataaactctttatcaacggcaatggaatggcagaaatgagaagtgaaacggagggttaattattgctgacgttgcacccactcttttagcgcctgacgactaattttaataccgccgtttttcagctccggcggcagagttagccagcgcaccggttgttgaaaacgggccagcttatctttcacccattcactaagatcaacgctctcgtggtcatactccatcaccgccaccggtcgatgaccaaactccttgtcggcaacggggacgataaacacctgcaaaaccgcaggatgtgcagcaattacgcgctcgacttcttccggctgaataccctctccgccactgaagaatagattgtctaaacgtccgacaatggtcagcttgccattatgcatctcaccgcgatcgcgcgtagcgtaccagccttcgtcattaaccagactaaccagttgcccgttacgccagtaaccttctgccatactggcagcccgcagccacacttcattattaacgattttcacttcccgacccggcagcgggctaccaacgtctgccaggccgtcggcttctttcgcacacaccgtggaggcaaactcggtcagaccatagccgcaaaagcaacgaatcccctgctcgcgcgcctgttccgtcaactcgaccgggatagccgcgccgccaagtaacaccgctttcagggaaacggaactacggttaaccagcaaacgccagagttgtgttggcaccagactagcgtgagtacagcctgccagcatttgctccaatggctgtttatcacgtaccgtcatccgcgcaccagcgtataaccagcgccacataattccctgaccggagacgtgaaacagcggtaaagagagcaaccaatcatcgtgatcgccaaacggaatcaggcttaacacaccttgcgcactggcaagatgggcctgataagtatggacagcggctttcggcaaaccggtagaaccgctggtcaacgtcatactgcacagacgcgtcggctgccacgtagcggcatgtgcgccttcaaccagctgaatgtgcaggctcgttaatgccggaaacgtgttttccccatccggcaccagagcaaattgcagcgtcagattgggcagcaattcttcaagcaacggttgcggcagctgagggttcacgggcaacacccgcgccccgcattgcagtaacgccagccaggcgagcagcgtttgcggcgtattccacgcccgcaacatcacgccgctgccctcaaccaccccctgcaccgcaaatccggaggctaattcatcgacgcgagcacaaagctcgcgccagttgagttgctcgtcattaagacgtaaggcgatggtttctccccgcacttgccgccagtgacgccacggccagtcagagaagatcataacaaccgctccagtgcatcaacttccacgacaggcagcgtgctacccggccagcgacgtacctgctgcgcctgcatcagatccagcgtgtccagccctggaatggtgtccggcgttaaccaggcggcaatccgcgccagttgcgttaagcctaagctgctttcaatggaagaactgatcaccgccgtcagccccagcgcgtgcgccgcctgtacctgctcgcgtactttttccagactgcccgtgagcgtgggtttgataactaccgcgcgcacgccctcttcagccacaaaggcaaaatccggctcgcgcaggctttcatcccaggcaatggcaatgccggtttcacgggcaaacgctcggctatcatcgcgggttttgcacggctcttcgagaaacgcgatgcggtcgcgataatccgggttaacgtatttggcaaactgctgacctttcagcggtgtccaggcgcgatttgcgtcaagacgcaaatgcagatccggaattgcctccagcaacagattcaccaccatgccgtcgcgcaccgcttcgtacaatcccactttgaccttcgccactttctcgcctggcatatctgcaagtttgaggatcagatcgtccggatcgccattacacagcggtgccgcacggtagttggctgcttgcggcaacgtatctgtcagttctgccaatgcacagcttacgccaaaggccacggaaggcatctgcggtagctcgcaatcgcctgccagccagttatttacccaggcaagcagcacactttgcgcctcttcccaggtttcctgactgaagcccggcagtggggagatctccccccacccttcgcgctcgccttcacgcaggcaaacatacagcccgtcgcgggtttttaaccgcctgtcgcgcagaaccacccccgcgtccatggggatctgccagcggtatacctgcgcgctacgcattacggattccgtttgaatttgctgaagtcaggctgacgtttctggttgaaggcgttgcgaccttcctgaccttcttccgtcatgtagaacagcatggtggcgttgcccgccagctcctgcagccccgcctgcccgtcacagtcggcgttcagtgcagctttcaggcagcgcagcgccatcgggctgttttgcagcatttcgcggcaccaacggacggtttctttttccagatccgccagcggtaccacggtgttcacaaggcccatatccagcgcctgttttgcgtcgtactgacggcacaggaaccagatttcacgcgcttttttctgcccgacgatgcgagccatgtaggaagcgccccagccgccgtcgaaggaaccgactttcgggccagtctgaccgaagatggcattatctgccgcgatagtcaggtcgcacatcatgtgcagaacgtgaccgccgccgatggagtagccagccaccatcgcgacaaccggtttcggacaggtacggatctgacgctggaagtccagcacattcaggtgatgtacgccggaatcatctttatagccgccgtaatcaccacgcactttctggtcaccaccggagcagaacgctttatcgcctgcaccagtcagaatgatcacgccgatgttgtcgtcataacgcgcatctgccagcgcctggatcatctcttttaccgtcagaggacggaaggcattgcgcacctgcggacgattaatggtgatttttgcgataccgtcggtggatttttcataacgaatgtcctcgaaaccttcggagcagtcgtgccattcaaccggtgcgtaaagcattgcttcatcaggataaatcatattgtgtcctttagtcagaaacgcaagatctgcgccagacttgcgattacgccagcgggattttcccgatgcgcgttatgtccggcgcgaggaatgacatggcagtcggcagccagttccgccgccagggcgcggaatttgctgtcacgttcaccacataaataataaaacgcaaatgtgcgggcgctaaggttagcacgtaaatcaggctggacggcgagagaagtcgcctccagcatggcggcaagcgttgcgccattattgttgctgcgcagcgccaccagctcccggcgttgatcgtcattgagactggcaaaaacaggctgttgataccagtcggcaaataccgccgttaacggttctgtgagaaaacgctgcacccattggcgatcggaacgctgacgttccgcacgttgttcagcattttgcagccccggatgcccgccttcgacaataaccccacaaagccccgccagcccctggcaagccgccatcatcgccacccgtccaccaaggctgtaccccaccagccagaagtcaaggatgttgtaactaaccaaggttttacgcagtaagtcggtgacatcatcaaatccatcgacgctaatcgccgcgctaccaccgtgacctgggagatcaacatacaaccgactgtagtcggcaaacgcctcgcccacttcttgccattcgtggcaatcgccggaaaaaccgtgcaaaaacaccagccagggtaaacctggttttccgtgttttgcctgcgcgtgcaggatcataaatggcttacctgcgccagaagttgctggagcgtttgcgcaccatcggtgtcgttaaccaccatttcaatcaccgtggtggttggcgtgcgccaggcgtcggcaaatgccgtttcaagttcctgccagttttgcggacgatgatatttcagctcgaacatcgcggcggcgtgctcaaaatggacgttttgcggcatcagatagaaacgctcacgctcgctttgcggcgttggcaacaggctgaaaatttgcccgccgttgttgttcaccacaattaataccagcggcgcagaaacctgacgcaataacgccagcgcgttgagatcgtaaagtgcggagagatcgcccacaatcgccagcgtcggtttgccgcttgcccgctgaacgccggcggcggtgctaagcagcccgtcgataccgctggccccacggttgctgtacaccgggtaacctgccggaagttggctaagcgcatcaatcagacgtaccaccaggctgttaccaacaaacaattgcccctgttcaggcagatagtcgcagatgcgatgcgccagttgcgcttcgccaaacgcatcacggcgggcaataaccgcctgcattgcctgttccgccaggcgcgggatttcaacgcaccagggctggcgtttttctgccggatgcagctccagccagtcggcaatattggcaattaagcgacgtccgcgatggtgtgccggatcaagtcgcccttcaatgtcatcaacaatccagtactcttctggttcacagcttgcctgccattgcaggagccgtttccccgtcaggctgcttcccagttgcaccacaatttgcgcctgctgcagctcgctggtcgctttggcattgcctaaccaaagatcggcacacggcagcggctgcccggtttgactcagcacatcgccaatcagcggccagccaagagtttgcgcccacagggcaacttttttgccctcttccgcactcatgcgcccggcaaccaccacgccgcgcttttgtcgccagaagaaccagtcgcgctgtttttcactttccagacgaggcgcttcacgcagccacggtttgtcttcctgccaccagtcacccagacgctgttgccagctaagcccggtatcgtccatttcgccatacagcggttcagcaaacgggcagttgatatggactccccccgcatgaagcgtaccgagagcgtggtcgatggtagaaaccagccaacgtgcggggatatcctgggtcgggcgcggcaaactaatactgtgcgtggggtgagaggcgaacattcccggctggcgaattgcctgattcgcgccgcagtcaattagctccggcgggcgatcggcggttaagagaatcagtttttctccggttaacccggcttcaatcagtgccggatagagatttgccaccgccgtgccggaggtcacaatcaccgccaccggctgcttgctgactttcgccagccccagcgccagatgccccaacccacgctcatcgaaatgggtgtggtgaatgaatgcggaattctccgccgccgctaacgttaacggtgtagaacggctgcctggggcgatacagatgtgtctgacgccgtgacgcgttaatgcttccagaatgaccgccgcccagcgtcggttaaatgcgcttacactcatgagtttgtccggtatcaatattgcggctaagtataaggagctacaaaaatagattattgatatgaatcggtaatgatgcgactcattattattccatttgtaataaagtacgcagccctgccgctttgttgtcgatttcctgccactcttgctcggggtcggaaccacggacaatgcccgcgccagcatataatcgcacgacattgccgctaatttttgcactgcgcagggaaacgcagaattcgctttgttgtaaactgagatagcccgcagaaccggcgtaccattctcgggtgaacggttcgtgacgggcgataaactgtcgcgccagatcgcgcggtaagccagcaactgctgccgttggctgcaactgatgtaaacagatcacatcatccgctttgttgagactagtccagatacagcggcgaagatgctgcactttacgcagacgcagtacctgcggcggtaaaacatccagcgtctgggtatcggcctgtaatcgttgacagatatcttccaccaccagcatgttctcgcgctggtttttatcatccgccatcagccactctcctaactgctgcgcctgcttatcatcaggattatttgctactgttcccgccagcgcttcagtacgcagcgctttgtcacgccgccgccataaccgttccggactagagccaagaaaagcattttcgccatcaaaggccatgtaaaaatggtagcaattcagattcagtcgacgactggcagccatcatcgccgccgcgttgaccggacttgcgaaatgcaggtcagttgcccgagcgagcaccactttgtcgagctcaccttcggcgatggttttcgttgccagttcgattaattgcgtccagcccgttttgtccggccagtgttgttctcgcgtggtggttaaatgtaacccaggcaagggcttgatactcaccagtgtggcgataaattcttttgcctgaatcgcatcgtgctgaagggagctttcgctgaatagcgtcagccgcagcgtggctttaccgccacagcgtcgccattccaggcggggtaaaagtaaattgccctggctcgggtcaaaagcattcagcccccaaatgcgtaagtcggcgtgttccgggtgctggcgaagaaaacgttgtgcctggtccaagctcgtaaaacgggtaatcgcgcccaggacgacagcttcttcatcaccattacgttgttgccagtagaattgcgggtatgtttgctgactggccagccagctcaaggcatcaaaagcgtctttgagagggaaaggaatatcgataacccgaatgccgggtgtcgccggaatctcttggctcaaatggcgcagtagattttccagcgccgtagtaagactttgcacgcggacctctccctgttaaaagcctcacattatacggggtactacaaaaaaaatgcagtaccccggtgtagggaggttttaacggcgtgccagcaacagtcctagtaccagcccaacggccgcgcccacaccaattccttgccagggtttttcgtggacgtagtcatcagcacgataaactgcctgcttcgcccgatagtaataactgtcactagcctggctaacccgttttttcacatcatccagcgctttttctgcacgcgctttcagctcaacatatttctgatcggcgggatcgccagaggagcggagcacctcttccagtgtttcactaagcagcgtcaggtcgtcatcgatacgtgtatcaccaaactgattagacattctcgttctccatttgcgtaaaacctgtcactaactatagacaagggttgttgattacgcctgaattacctcgcgtgccatcccaatgtgtgggataccatcttcttcatagacctccgtcacagggataaaaccgaaactctggtagaagttttgcagatgcgcctgcgccccgaggtaaacaggcttatcaggccagtgatgcgtacatgtttcgagtgttttactcatcagctgctgccccactttttcgccacgcaacgcttcactgacaatcacccgacctataacgaccggctcaagatcatcatcacttttcagaatcctcgcatacgccaccagttcatcatttttccaaccgagaatatggcgattatcccccgtcaaatcatcaccatcgatatcctgataagggcaattctgctcgacaacaaacaccgcgcaacgcagttgtaataaggcataaagctgggaaacgcttaattcagagtgatgcagatcttgccattcaatcataatgctctccttttagatgtatgccttatactagccggaatattttttgaaacgtgatgaactcatggaattaatttttttaggtactagtgccggtgtgccaacccgcacgcgcaatgtcacggcaatattgcttaacctgcaacatccgacccagagcggactttggttgtttgactgcggtgaaggcacccagcatcagctactgcataccgcctttaaccctggaaaactggacaagatttttatcagtcaccttcatggcgatcatctttttggtttacccggcttgctgtgcagtcgttctatgagtggcattatccaacccttaacgatttatggtccgcaaggtatccgtgaatttgtggaaaccgcgctgcggattagcggcagttggaccgattatccgctggaaattgtcgaaattggcgctggcgaaattctcgatgatggcctgcgcaaagtaaccgcttatccgctggaacacccactggaatgttatggctatcgtattgaagaacatgataaaccgggtgcattaaatgcccaggcattaaaagctgctggcgtgccgcctggcccactgtttcaggaattaaaagcgggcaaaacaatcacgctggaagatggaaggcagattaacggcgcagattacttagctgctccagtgccaggtaaagcgctcgctattttcggcgataccggcccctgcgatgccgcacttgacctggctaaaggtgtcgatgtcatggtgcacgaagcgacgctggatataaccatggaagccaaagccaatagtcgcggccatagctctacacgccaggctgcgacactagcccgtgaggctggagtcggcaagctaatcattacccacgtcagcagccgctatgatgacaaaggttgtcagcacctgttacgtgaatgcaggagtattttcccggcgactgaactggcgaatgatttcaccgtgtttaacgtttaactctgcttattattaaaaacagggcgaaacttgccctgttatcgcaacccgcgctacatatatccacccacacaggcatattgagcgatttttgatatttattcatctccttacgcactatattcagagcaataagttgcctcttttcatcttgattcagcacaacctttgcaactaaaaggagcccatgatggttacagttgtcagcaattattgtcaattatctcaaacgcaactcagtcagacatttgcagaaaaatttactgtgaccgaggaattactgcagtctttaaaaaaaacagcgttatccggagatgaagaaagcattgagttactgcataatattgcgttaggttatgataaatttgggaaagaagctgaagatattctttaccatattgttagaaccccaacaaatgagaccctaagcattatccgacttatcaaaaatgcttgtttaaaattatataatctggcacatatcgcaaccaactcccccctcaaaagtcatgatagtgatgatctcctgttcaaaaaactattctcccctagcaaattaatgacaattatcggtgatgaaattcctcttatatctgaaaaacagagccttagtaaggtgcttttaaatgatgagaataatgaactgagtgatggtacaaacttctgggataaaaatcgtcaattaaccacagatgaaatagcttgctatcttcagaagatcgccgctaatgcaaaaaatactcaagtcaattatcctactggtctctacgtcccctactccaccagaactcacctggaagacgctctcaatgaaaatattaagagcgatccaagttggccgaatgaagtccagttattccccataaatactggcggacactggatattagttagcctacagaaaatagtaaataaaaaaaataataaactacaaataaaatgcgtcatattcaacagtttgcgtgcactaggctatgataaagaaaatagtcttaagcgtgtcattaatagttttaattctgaactcatgggagaaatgagcaataataatataaaagttcatttaaatgaaccagagataatatttttacatgccgatcttcagcaatacttaagccaaagttgcggtgcatttgtgtgcatggcagcccaggaagtgattgaacaaagggaaagcaattctgacagcgccccctatacgttattaaaaaaccatgctgacagatttaaaaaatatagtgcagaagagcagtacgaaattgattttcaacatcgactggcaaacagaaattgttatttagataaatatggcgatgcaaatatcaatcattattatagaaacttagaaataaaacacagtcaacccaaaaatagagcatccggcaaaagagtgagttaacatcattgttaattaattcgaccagtcagcaaatatgctgactggtcgaacatagtttgctaaacagtcatcactgactgatgtcagtcacaccatccgccagttcaatcaggcgaataaattccgccctgtaaccctgtggatcttccccttttgcctgctgagcccactgtttgatctgctgccaggaggtattgttcaggtattcagaaccgcgtaacttttgcccatatgcagctactgctgcgcgaaaacgcatatcttcagagggcgcgtttattgttggccccagcgggaattcaactaactgactttcttttccctgcgggtatttccagcgaatttttaaccaggccagttctttcgttttgtcgcttttcgctaatttgttatccggggcatagcgtaacttatcaatacttgctttttgcccgttcagcgttaattcgaataacaacgttatatgtttgcctgcgcctatatcccctgcatcaacgttgtcgttattaaaatgttccacccgaagttggcgcttttcataaccaatctgacggtattccgttacccacgcggggttaaactcaatttgcgctttgacatcttttgctacggtaatcaacatctgccgcatttcactattcaatactttctgcgcttcagagagggtatcaatgtagctgtagttgccgttaccaacatcggcaattcgcaccatcattgcctcgttgtaattgctattccccacgccaaacgtgctcagagtaacaccagactcccgctgttttttgaccatactttcaatgctttttggatcgtcaatgccaacgttaaagtcaccgtcagtggctaataaaatgcgattgatgccgcccttaataaaccccttcgtcgcctgctgataagccagttccagcccggcaccgccattggtactgccttcggcatccaggctatcaattgcggcattaatttccgccttatgactcccggagatagaaggcaatgcaatacgggagtcgccagcgtaggtcacgatggcaatgttatcctgctcacgaagttctttgaccaataatttcaagctagactggataagtggcaaacgttcatcagaaatcatactaccagaagtgtcgataagaaagaccagattagaagctggtaactcttcacttttgcgatctttcgccaggatatcaactttcagcaatgttcgctgttcattccatggtgcaggtgccaattcgtagcgcatagcgaaaggtattggcttagaggccggaatagattgtttgtctttgatatcccaatcagacgggaaataattgactatctcctccacccgcacagcgtctggcggaggtaacagcccttgattgaggaaacgccttacattcgcataactgccagtgtcaacgtcaagactaaacgtcgccaacggattttgcgctacctgcttaaccggattatcatcgaactgctggtagcgagcggttcctggatttgcgatatgtgtagcttttgctttagccgctcttgcaaatgttggcgcttcctgcaatcgcccctgtaaagcctgtttgtcactatattgttgcacttcttgctgggccaaggctttcgcggcggcggcgctttgctcagcctcttttattgcagcttgctgcgcggcaagcacttgctgctctgtgggagtactgggttgttgttgctgactttccttattctcaggttgcggcccacatccactcaaaatcaaactactcataagcaacatgattatatttttatttcgcatataaaatccttttaaataaactcaggcaccagacataaaatatactctttgtataatcctgctaatcttaataaaatacaatatcgaaacccatagcaaataatgattcaacaacgcaacccattaataatttgcatatgaaaaaaataatctttgcttttattatattatttgtgtttttactccctatgattattttttaccaaccctgggtcaatgcattaccgagtacgccccgacacgcaagtcctgagcaattagaaaaaacagttcgttatcttacacaaactgtgcatccacgtagtgccgacaatattgataatctgaataggtccgcagaatatataaaagaggtctttgtcagtagcggtgccagagttaccagccaggacgtccccattacgggtggcccctacaaaaacattgttgctgattatggtcctgccgatggaccgctgattattattggtgcgcattatgactctgccagcagttatgaaaacgatcaattgacctatacgccgggcgcggatgataacgccagcggtgtggcaggattactcgaactggcacgtttgttacatcagcaagtaccgaaaacaggcgtgcagctggtcgcctatgcgagcgaagaaccgcccttctttcgtagcgatgaaatggggagcgcggtgcatgcagctagccttgagcgtccagtgaaattaatgatagcactggagatgattggctattacgactctgcgcctggaagccagaattacccttacccggcaatgtcctggctttatcccgatcggggagactttattgccgtggtcggcagaatacaggatatcaacgccgttcgtcaggtaaaagcggcattgttgagttctcaggatttatctgtttattctatgaataccccagggtttattcccggtattgatttctctgaccacctgaattattggcaacacgatattcccgccataatgattactgacaccgctttttatcgtaataaacaataccacttgcccggtgataccgcagacagattgaattatcagaaaatggctcaggtagtggatggtgttataactttgttatacaacagtaaataataaaaatttctcgaggcgggtccagaaaaagcgacatgcacattttattttccctcatctgttttaagatgcgaaacatgaaattcaacggaggaaaaataaatgggaatgattggctattttgcagaaattgacagtgaaaagattaaccaactgcttgagtctactgaaaaacctttgatggataatatacatgacacgcttagtggattacgccgactggatattgataaacgctgggattttttacactttgggctgacaggcacctctgcttttgatcccgcgaagaatgatccgctgagtcgtgccgtgcttggtgaacacagcctcgaagatggcatagatggcttccttggattgacctggaatcaggagttagccgcgacaatcgaccgactggaaagtctggatcgaaatgaactgcgtaaacagttttccattaagcgactcaatgaaatggagatttatccgggagtgacctttagtgaagagttagaggggcaactctttgccagcatcatgcttgatatggaaaagctgattagcgcgtatcgacgtatgctgcgacaagggaatcatgcgctgacggttattgttgggtgatatagcttgatgcctgggggagaaagacccattagttaagatttacgccaggatcatcttgaaaaaatctttaaccatggtccggtttttatccccttgtataaatattactaaatgcttgcttagtcgcattgttaaatgcaataccgtatattcggtatgtaacagcgatatcctctgtgctggcaacgatctgtcatgcttgatgaaaacggaattgaacctgtcattaccaggtagataaaaagcctgttcaattttgggattattttttataactcgtgtctgttatggcgacacgggaaaacatcaatattgtccttcacaaattgcagtaatatagaatcaacctctcttgcaagttggtcacaatgtattataagcattttgaatatgtcatcctctgtaatctcgtgaaaattttcggccttgtcttttagctcatcatatcggattcttgcagtaaccattttttgggcgagttctaataaccccaaagcttgcaattgctggtgagtatgatcactttcaaaaaatatcccacactccattccttcccaaccaacatattcatgccattcataaaccagcataaatgtttgtaaaactggcggtaataattggatatctgcaaaaccaaaccaaaacttacgcttgagatcccactcatattcaatcgccaatgctatattgtttaaggcatctccggcatccttatttttacgcaaaatcaattccgtcagtgtatagcgttgttcatcaatacgccgaagagcttctgcaatatcatagtttgtagccaacaaaacattctctgcttcctgatgagtgacgtctgcttttgccgtcaatatattgatttggtcaatatgaaacaacttgatggcttcatcaacatcaccgccagtcctctctaacaaacgtctggcaacctggataccgacaggtacgttcttccgaagtttacgaatttcacttaaccattccatgtcaaacccctttaaatatttatgatattaaatataacaacgtctggataacgacccggcctgactgaatatctcacgttttcctgcttaacattcatgttatgatgctcttgaaactaataatacgtatggaattgtcactatttatctgctaatgaatagtaacaatgtcattcgtttgatgaatatattatttcagggaataattatgacacctttagaacgcattacccaacttgttaatatcaatggtgatgttaataatcctgatactcctcgtccattgttatctcttgaggatttttttattgacaataatatccatggtagtatatgttgcaatgtgattccagaacaatctccgcaagctatctatcaccattttctgaaaatacgtgagcgtaacaatgttagtgatgttttggtagaaattacgatgttcgatgacccagactggccctttagtgaaagtattttagttatcaccactgctagtccagaagaagttcagagctggtttgtagaagaaattgcccctgatgagtgctgggaaggatggagtgaagatacggagcatggatgggttgaagtccctgtgggtatgcatccggttacttgttggtgggattaaaacatttatataaacagataagcggatgtttacataaatttttatgtgaaggaacatgatgaaacttattcctcgcagtagtgatattagtcctggcattgatggaatttgcccggggccttttcctccgaacggatttaccgtacttacagatgcagcatatggtaacggagactgtttcggtttgtactggcctattggtcaggagcataaactacctatagtgtgcgaaacgtaccatgacgaatggcgaatcgtacctgccttttccagcattaagaagttcgaagaatggctggaagtgaatgatgatgatccccatgaaaatggcatcagcatcgaagatcaagactttgcagcaaatctcttccgtgttgctcggaaatgtcttagtacgggaaggcttgatgacgcactgccactgttacagcgagcaacagaacaattgcctgaagtcagcgaatattggttagcactggcaatccagtatcgccgatgtaaaaaaacagaagctgcagcacaggctgcgcttaatgcttatcttggcaattgggcatttggtgttcctgacaataaagtcattcatttgctgagtcaggccgcagatgtcccgaatttccaggatgatcctgtgattcagtgcattaaagaacaaggattagatcttagctttggaggaacaaaggaaaataataattaccccttgatgcagatgtgtgttgatacttattttgcgcagagaaaaccgcttcaggcattaaccctgttacataattatgcctggataatgtccagtgaaacgactgcatttcaggaacgctatgattttaatatcgatgaatggcgggcaaaattcaggcagttatgtttagagtattttggcgatagtcgtacacagttcacttaacgctctgcgtctatctactatcccttctttttcagaaaaaccgccgagcatgtcggcggctttctgacttacaaagtaacagattacatcagcggcattgccaaacgcacaatgctaatcagcggttgtggccatacacccagcaccagtaccaacagtgcagagatcagcacaacgataccgcccgcgctgtactgccagttacttggtgcatcgcgacccggttgttccggggcgtgaagatacaggctcaccgccacgcgcaggtagtagtagaggccgattgcgctaccgacaaccacggcacccaccagccaccacaagtgtgcctggacaccgaccgccagcacgtagaacttaccgataaagcccagcgtcatcgggataccggccagagacagcatcatcaccgtcatcactgccgcgaggatcggacgatgccagaacagaccgcggtaagagaacagggaatcagcatccgggccacgatacgggctggacatcaggctgaccacgccgaacgcgccgaggctgctgaacagataaccggccaggtaaacccctaccgcttccatgctcatctcgccggtttgcagcgcaatcagcgctaccagcagatagccgaggtgagagatagaactgtaaccgagcagacgtttgatattggtctggctcagcgccatcaggttaccgaagatgatggaggcaaaggcgataatcgccagcaccacgcgaatcgcttcgctgtcacccaccggtgcgtagaggaacagacgcatcaccacaccgaagatagcgattttgctcgccgtcgccaggaaagtggaaaccggcgcaggcgcgccctggtatacgtctggcgtccacaggtggaacggcaccagagagagtttgaagccgaggccaacaatcatcaggccgaaacctgccagcaacagcggctcgttgagcataccgtcgccaaggtttttacccaacgcgacaaagctcaggtcgccagactgcgcatacaccagcgccataccaaacagcaggaaagaagacgctgcggcagaaaggatggtgtatttgatactggcttccagactacgtttctggcggaaagcgtaaccgaccaggccaaacagcggcaaagagatcagttcgataccgaggaacagagacgccagatggttggcattcgccagcaggatcccgcccagcgcggcaattaacaccaacaggtagaactcatccttgttgtcgttatagccttcaagccacgggtaggcgaaagtacaggtggcgaggctcgccaacaataccagcccggtgtaaagcatggcgaaaccatcaacgcgcatcagcggcgtaacgtccatagcgcccgcctggccaacaaaccagagcgaaaccagcgccgcgttaagcccaataaccgagagcgtagcgttgaggaaatgattgcgtcgccacgcaatggagagcatcacaaccaccaccgtcaagccgacgatcagcaacggtagcagtgcgatcaggttttgtggagttattgtcatggcgatttacggccttgtagtagtaacggaattaacaaaccactgctggatattgccaatcgcggagtggctggtatccagaatcggctgcggatagaagcccagcagtaccagcagcaccaccagcaacaggatcataaacagctcacgcaggctcatccctggcagttcctggctggcaatctggcttttcgctttaccgaagtaagcgcgatgtaacatcgccaggctataaacagatgcaaagaccagcccaaaggtagagataacggtaatcaccggtacaacctggaagctgccgaacagaatcataaattcgccgacgaagttaccggtgccaggcatcccaagcgttgccaccgcaaagaacaggctcagtgctggcagccatttcatcttgctccacagaccgcccatcatgcgcatgtcgcgggtatggatacgttcataaagctgaccacaaagaataaacagacccgccgcgctcaaaccgtgcgcaatcatctggattaccgcgccctggtaggccaactggctgccggtgtagatagcaatcagcacgaagcccatgtgggaaacgctggtgtaggcgatcagacgtttgatatcggtctgggcgaaggccatccacgcaccgtagaagatgccgataacacccagccacatagcaattggcgcgaactctgcgctcgcgttcgggaacagcggcagggagaaacgcagcaaaccgtaagcggcagttttcagcaagatccccgcgaggtcaacggaaccggcggtcggagcctgggagtgcgcatccggcagccagccatgcagcggaaccaccggcattttgactgcgaaggcgatgaagaagcccagcattaacaggtattccacaccactggacattggcgtattcagcagctcttcatagttgaaggtccagacgccggtcgcattgtagtgaacaaaaaccagcgccaggatggcaatcaacatcaccaggccactcgcctgggtgtaaatgaagaacttggttgccgccgtgatacgcgttttaccgtcagaggctttatgcccccacagtgcgatcaggaagtacatcggcaccagcatcatttcccagaagaagaagaacaggaacatgtcgatggcaaggaacacgccgataacgccgcccaggatccacatcaggttgaggtggaagaagccctgatatttttcgatctctttccagctacatagtaccgccagcacaccgagcagaccggtcagcacgaccatcagcaggctcagcccgtcaatggcgagatgaatagagataccaaaacgcgggatccacggcatgtcgaattcagactgccactgcggaattccggcggattgcgtcagactataaccgccctgcaaccacagttgcaggctcagcgccagcgtcaatcccatggtgatcagcgcgatccagcgtggcaccttgacgccaaagcgttcggtctgccagcacaggaagccgccaataaagggaattaatattagccagggtagtaacatggcgatctttattccttgtaaaagtcccgtcaggaccggattttcaacgaattctcacgacagaaaattctcttcggactgggggtagtgtcggatgcaccgcgaaggcggcttatccgacctacgttcttatatgcccaggggcaatcccacaatccttaactcaacgcagtaccatcaacagtgccagcaccacgaccgcaccgatgctcatggatgccacataccagcgcagatagccgttctcacttaacagcagacctttacctgcaaagcgggaaaggacagccgggatgttcatcatactgttcagcggatcgcgtttcagcaaccaggcaatacccaggaacggcttgacgaacactttgtcatacagccagtcaaatccccaggcgttgtaccaccaggtgcccagcagacggcccggcgcactgttggcgatggaggtcaccagagtacgtttacccagccacagccaggctgccagcagaatgccgaccaccgcgaccacgccagaggtaatttccagggtcaacatgctgccgtgcgccagttccgtcgtttgcggaagcacgccctgcagcggcggtacaatcagtgcgccaacgaaggtggaaaggatcagcagcacaatcagcggcaggctgtgagttacccctttcacggcgtgagcgtgaatttgttcttttccgtggaagacgatgaaaatcatacggaaggtgtagaggctggtcataaacgcaccgaccagacctgccaccatcagattgatatgaccattcgccatcgcacccgcgaggatctcatccttactgaagaagcccgcagtgaccagcggtagtgcgctcagtgctgcgccgcccaccaggaagcagagataaaccagcggaatagatttacgcagaccgcccatcttgaagatgttctgttcgtgatggcaggccagaatgacggaaccggatgccaggaacagcagcgctttaaagaacgcgtgggtcatcaagtggaaaatcgccgcatcccatgcctgcacgccaagcgcgaggaacatgtagccaatctggctcatggtagagtaagcgagaacacgtttgatgtcggtctgtaccagcgcggcaaaaccggccagcagcagcgtaaccgccccgacaatacccaccagatgcagaacttccggcgtcatcaggaacaggccgtgggtacgggcgatcaggtagacacccgcggttaccatggttgcggcgtggatcagcgcggagacaggcgtcgggcccgccatcgcgtcggcaagccatgtctgcaacggcaactgcgcagatttaccgaccgcaccgcccagcagcatcagcgtcgcccacatcagcatgttattgccgtcagcaaagtgcgctggtgccagttccaccatttcgcggaagttcagggtgcccagttcgttgtaaagaatgaacagtgcgaaagcgaggaacacgtcacccacacgggtcacgacgaacgctttcattgccgctgcgccattcttcggatcggtgtaatagaacccgatcagcagataggagcacaggcccacgccttcccagccgaggtacatcagcagcaggttgtcggcaagcaccagaaccaccatgctggcgatgaacaggttggtgtaagcgaagaagcgagagtagccctcttcaccgcgcatataccaggaggcgtacatgtgaataaggaaacccacaccagtgaccacgctgagcatggtcaggctcaggccgtccagcaccaggttaaaaccgatgttaaagtcgcctacgctcatccacgtccacagcggctggctgtatgtctgctcgccgttagcgaagaaatcaacgccgataaaggcggttaccagcgccgccaggcccacagagcctacgccgacgatcgcgctgacgttttcagaccagcgcccacgggagaatgccagcaggacgaagccaatcaatggcaaaataatggttaaggcaagcatgttcatccgcgcatctcacttacactatcgatgttcaggttctggcgacgacggtgaagttgcagcagcagcgcaaggccgatactcgcttctgccgccgcgaggctgatggcgagaatgtacatcacctgaccgtcggtctggccccagtagcttccggcgaccacgaaggccagcgcggaggcgttaatcatgatttccagaccaatcaacataaacagcagattgcgacggataaccagaccggttaagccaagaacgaataagattgccgcgaggatcagtccatgttgtaaggggatcatgcgtgctcctccgtttttcttttcgcgctgtcgtctttacgattgctcagcacttcacccgcacgctcttcacgaccgacgtggaaggccacaaccagacctgcgagcagcagcatagaagccagttccaccgccagtacgtaaggcccgaacagcgtaatacccactgctttagcactgattggcgtaccgtcgataccctgatcgttaacaccgaggatggcgtaaacaatcaccaccagcatgatggcgctcaaaattgccggaccaatccacacctgcggtttcagccactggcgttcctgttcgatttcactaccgcccaggttgagcatcatcaccacgaacacgaacagcaccataatggcacccgcgtagacgataatttccagcgcaccggcgaagtaagcgcccagactgaagaacaccccggaaatcgccagcaggctaataatcaggtacagcagtgcgtgtaccggattggtatgggtgatcactcgcaaggtcgcaagtatggctatcaggccacagatataaaaagcgaactccattgcccctctccttacggtaacaggctcttgacgtcgataggcttggcttcgttctctgcttcgcccttatctttgccgtcgattgccatacctgccatccggtagaagttatattccgggtatttgcccggaccggagatcagcagatcctctttctcgtaaaccagatcctggcgcttgtattcccccatttcgaaatccggggttaactgaatcgccgtggtcggacaggcttcttcgcacagaccacagaaaatgcagcgactgaagttgatgcggaaaaattccgggtaccagcgaccgtctttggtttctgctttttgcaggctgatacagccgaccgggcaggctaccgcgcagaggttacaggctacgcaacgctcttcgccgtccgggtcgcgggtcagaacgatacgaccacgataacggggcggcagatagaccggctcttccgggtacattcgcgtttcgcgtttggcgaacgcgtgcaggccgatcatccagatactacgaacctgggtgccgaaacctactaacaattcttttaaggtcatggtcttattgccccttattgcgcctgccagagaatgacagccgccgttaccagcaagttgatcagcgtcagcggcaggcagattttccagccgaaggacattacctggtcataacgcggacgcggtaagctcgcacgaatcaaaatgaacatcatcataaagaacgcggttttcagcgcgaaccagatgaatggcggtaacaacgggccttgccagccaccgaagaacagcgtcaccatcaatgcagagatggtcacaatcccgatgtactcacccacgaagaacagaccgaacttcataccggaatattcaatgtggtaaccatccgccagttcctgctcggcttccggctggtcaaacgggtgacggtgacataccgccacgcccgcgatggcaaaggtaataaaaccaaagaattgcgggataacgttccacacatgcgcctggctgttgacgatgtcggtcatgttgaaactaccggcctgcgccaccacgcccatcaaggaaagcccgaggaacacttcgtagctcagggtctgcgcagaagcacgcatcgcacccagcaagctgtatttgttgttactactccagcccgcaaacagcaccgcgtaaaccgccagacctgccatcatcaggaagaacaaaatcccgatgttcaggtcggcaaccacccaacccggactgactggcacaatcgcaaaggccagcagcaggctggtaaaggcaatcatcggtgccagggtaaagatgacgcgatcgctgaatttcgggatccagtcttctttaaagaacattttgatcatgtccgcaaccagctggaggctaccgccccagccaacacggttaggtccgtaacggttctggaacagacccagcaggcgacgttcgccaaagctcatgaatgccccgcaggtgacaaccaccagcaggatcaccaccgctttgaggatggtcagcaggatctcaatcagttccggacttatccaactcattgttgtgcctccttgagatcctcaagatgcgcgccagccagcaccggagcaatgccggacatacccatcggcaagcccacctgccctgccgtcagtccttcggcgatttcaaccggcagcgtgaccgtgttgccatcgtaactaaaggagacgcgtgtacctgcgttcacacccaacttcgcggcatccgctgggttgagtttgatgtacggctgcggcatacggctctggaagaccggagcacgctgactcaattcatcgctgccaaacaggtggtaatacggcgcgatacgccatttcccgtcctgcggctggaagcgtgccggtacgctggtgaagtaatccagaccattttcgctggtttcaaacagacgcacgcccggatcgccaaagcgcagtttgccgcccacttcgtcctggaatttgttccacgcctgcggggagttccagcccggcgcccaggcaaacggcacttggctacggtgcgcagtcggctggttgttaccttccatgctgaaggtgaacatggtgtcaatatcctgcggctgacgcggctcatgaacgctgatattggcgcgcatggcggtacgaccgctgtaacggtgcggttcacgggccagtttctgcccacgaatacggaatgtcgcatccggcgcagcatctttgatacctgccagttccgggattttcgccacaacagcgtcaatcacatggtcgagctgcgtccagtccacttcacggctcagcagggtgctgtgcaggctgtgtaaccagcgccagctttccagcatgacagttttgctgtcgtaataagcaggatcgtaaacctggaagaaacgttgggcgcggccttcgttgttgatcaccgtaccgtcgctttcagcaaagctggcagcagaaagtaccagatgggcgttttccataatcgctgtgcgttgatgatcaaccaccatcaccagcggtgctttagccagcgcagcattcacgcggatagcagaagcgtgacgatgcagatcgttttccaacaccaccaccgcgtcggcgcgtccggtttccagttcggttaacgcttcttcaaggctaccgccacccataatgcccagccccatgctgttgacggaacgggcaatcatggtgataccgacgtcagcgccgcgacctttcagggctttcgcgacgttagccgccgcctgaatcacctctaagctaccggcgttcgtcccggagataatcaacggtttcttcgcacctgccagtgcctgcacgatgacgtcgattttgctttgcagctcaggttcgataccgtcaaccgctggtgcagagttatccagcgcatgggcgatggcaaaacctaaacgcgcctgatcttcaaccggtgcgcggtaagtccacgccgcgatatcatccagacgggtgtcatcaacgttggtaacaaacagcggatgcttcgcacgttgaccgatgttgaggattgccgcaatctgccagtcagccactttctgtgctgccgccatttcgcgcgctttacctttcacagcctgacgcactgccagcgcgacgcgcgcgccggtctgggtaacgtcttcgcccagcaccagtaccgcatcgtaagattcgatttcgcgcagagccggagtataaatgccgccttcacgcagcactttcagcgccagttgcagacgttcctgctcaccgtgagcgataccggtgtagaagttttcttcgcccaccagttcacgcagcgcaaagttgctttccacgctggcacgcggagaaccaataccgatcactttcttgctctgacgcagaatatctgccgcgccctgcattgcctgttcggcgttgagggtaatgaaatcatcgccacgacgctgtactggctgacgcggacgatccttcaggttgacgtaaccgtaaccgaaacgaccacggtcgcagaggaagtagtggtttaccgtaccgttgtaacggttttcgatacgacgcagttcgccgtaacgttcaccggggctgatgttacagccgatggaacattgctggcagatgctcggcgcaaactgcatatcccatttacggttgtaacgctcggagtgcgttttgtcggtaaatacgccggtcgggcaaatttcgaccaggttaccggaaaattcgctttccagcgtgccgtcttccgggcgaccgaagtagacgttgtcgtgcgcaccgtaaacgcccagatctgtaccgtcagcgtaatctttgtagtaacgcacacagcggtagcaggcgatgcagcggttcatttcgtgagagatgaatggccccaaatcctgattacggtgggtacgtttggtgaaacggtagcgacggaagctgtgtccggtcatcacaatcatatcctgaagatggcagttaccgccctcttcacataccggacagtcgtgcgggtggttggtcatcaaccactcgaccacgctttcacggaactgtttcgcttcttcgtcgtcaatggaaataaaggtgccatcggaagccggtgtcatacaggacatcaccaggcgaccacgcgtgtcttccgcgttttggtattgcttcaccgcacactggcggcaagcaccgacacttcccagcgccggatgccagcaaaagtaaggaatatcaaggcccagagacagacaagcttccagcaggttgtccgctccgttgacctcgtattctttgccgtctacatgaattgtagccattagcatgcttccagttttctcagtcagagactgagcgttaatcgaaattcggttaccagcgctctttcagcaggttcggctgaatcccattaatcaaatgggtattgctgaacggctgtttgattcccgcctcaaattcttcgcggaaatatttgatggcgctctgtaacggctccactgcaccaggtgcgtgggcacagaaagttttacccgggcctaagaatcgacacagttgctcaagtgtttcgatatcgcccggctgaccttcaccacgctccagcgcacgcagaattttcacgctccacggcagaccgtcgcggcacggcgtacaccagccgcaggactcacgggcgaaaaactcttccaggttacgcaccaggctcaccatgttgatctcatggtcaaccgccatcgccagcgccgtacccagacggctgcccgctttaccgatactttcgaattccatcggcagatcaaggtgcgcttcggtcaggaagtcagtccccgcgccgcctggctgccaggctttaaatttcagaccatcacgcataccaccggcgtaatcttcgaggatctcgcgtgcggtggtgccgaacggcagttcccacagtcccggatttttcacccgaccggagaagcccatcagcttggtgccagcatctttacttttgctgatgttctgataccactccacgccgttagcgaggatcgccggaacgttacacagggtttcgacgttgttgacacaggtcggtttaccccatgcgccggaggttgccgggaagggtggcttgctgcgtgggttagcacgacgtccttccagggagttgattaacgctgtttcttccccgcagatgtagcgccctgccccggtatggacgaacagttcgaaatcgaaacctgttcccataatgtttttgccaagcagacccgcttcggtggcttcggcaatggcacggcgcagattaactgccgcttcgatatattcgccacgcaggaagatgtagccacggtaagctttcagcgcaaacgcggagatgagcataccttccaccagcaggtgcggcagttgctccatcaacaggcggtctttataggtgcccggctccatttcatcggcattacacagcaggtaacggatgttcatggattcgtctttcggcatcaggctccatttcaggccagtgctgaagcccgcgccgccgcgccctttcagaccagcgtcttttacctgattaacgatttcgtccggagacagcccggtcagcgccttacgcgcgccttcgtaaccgtttttgctgcggtattcgtccagccacactggctgtttgtcatcgcgcagacgccaggtcagcggatgcgtttcgggagtacggataatgtttttcatttataccgctccagcagttcagggatcgcttccggggtcagatgcgcgtgagtgtcctcatcgatcatcatgtttggccctttatcacagttccccaggcagcaagttggcagcagcgtaaagcggccatcaaatgtcgtttgccctggtttgatgttcagctttttctcgagcgccgcctgaataccctgataaccgttgatatgacagaccacgctgtcacaataacggatcacatggcgaccaaccggctggcggaagatctgactgtagaacgttgccacaccttcgacgtcgcttgccggaatacccagcacatcggcgatcgcgtggatcgcaccatccggcacccagccacgctgcttctgaacgattttcagcgcttcaatggacgccgcacgcgggtcttcgtagtggtgcatctcgtgctcgatcgcttcacgctctgccgcactcagctcaaaagcctcggtttgtggttgttgattctcgtgcataattagcggtccacatcactcataacaaaatcgatactgcccagataaacaatcaggtcagacaccaggctgccgcggatcgccgccggaatttgctgcaaatgcgcaaagctcggggtacgaacacgggtgcggtaactcatggtgctgccgtcgctggtcaggtagtaactgttgatccctttggtcgcctcaatcatctggaaagattcattggcaggcatcaccggaccccagctcacttgcaggaagtgggtgatcagggtttcgatatgttgcagcgtgcgctctttcggcggcggcgtggtcagcgggtgatccgctttgaacgggccttccggcatgttgttgaggcactgctcaagaatgcgcagactctggcgcagctcttccactttaagcattacgcgggtgtagcagtcagaaacgccaccacccaccgggatttcaaagtcgaagttttcatagccagaataaggacgcgccttacgcacgtcgaagtcgatcccggtagcacgcaggcccgcgccagtggtgccccactccagcgcctctttcgcgccataggcggcaacgccctgggaacgacctttcagaatggtgttttgcagcgccgctttctcgtaagacgccagacgtttcggcatccagtcgaggaactcacgcagcaggcgatcccagccgcgcggcaggtcgtgcgctacgccgccaatacggaaccacgccgggtgcatacggaaaccagtgattgcttccaccagatcgtaaattttctgacgatcggtaaaggcgaagaacactggcgtcattgcgccgacgtcctgaataaaggtgctgatatacagcaggtgactgttgatgcggaacagttcggagagcataacgcgaatgacgttaacgcgatccggcacggtgatcccggccagtttctctaccgccagcacgtaaggcatttcgttaacgcagccgccgaggtattcgatacggtcagtatacggaatgtagctgtgccaggactggcgttcgcccattttctccgcaccacggtggtggtaaccgatgtctggtacgcagtcgacaatctcttcgccatcgagttgcaaaacgatacggaaagccccgtgcgcgctcgggtggttcggaccgaggttgaggaacatgaagtcctcgttttcggtgccgcgcttcatcccccactcttccggtttgaaggtcagggcttccatctccagatcctgtttggctttggtcagctcaaacgggctgaattcggtagcgcgcgccggataatctttacgcagcgggtgacctttccaggtttgcggcatcatgatgcgtcgcaggttcgggtgaccgtcgaaagtaatgccaaacagatcccaggtttcacgctcataccagttagcgttcgggaacagtttggtgaaggtcggtacgtgcaggtcgttttctgccagcgccaccttcagcatgatgtcgcggttacgatcgatagaaatcagatggtagaaaacggaaaaatccgcggcaggtaacccttcgcggtgtgtgcgcagacgttcgtccatgccgtgtaagtcaaacagcatgacgtaaggtttcggcagtttctttaagaaatcgccaacttccagtaattgttcacgcttgatccacacaacgggaaccccggtgcgagtcgcctgaacagtaaaggcatccggcccaaaacggttgcgcagttcgccaatcaccggatcatcaagatgatcgcgggtctgccaggcgggttcttgcgcggttaagtcggtcatattgttcaccattgcaaatggtccgtggtgactgtcggcgcagtaagcttcgcgaaatagatttaggaataagcgaagaaaaatccctttgccgacaggcgcaaattaaatctcgtcaggtgtacgcaggttagttacggcaatgcgttcaccgcgcttgcgttcgcgctcactttgcatattggcgcgataaacgccctgatcgccaaccacccaggagagcggacgacgttctttgccgatagattcctgcaacagcatcagtgcctgcatgtacgcttcaggacgcggcgggcagcccgggatatacacatcaaccgggatgaatttatcgacgccctgcacaacggaataaatatcgtacataccaccagagttggcacaggcacccatactgataacccattttggttccagcatctggtcatacagacgctgaataaccggtgccattttggtaaagcaggttcctgcaaccaccatcaggtcagcctgacgcgggctagcacgcaatacttctgcgccaaaacgcgccacgtcatgcaccgcggtaaagctagtcaccatctcaacgtaacagcaggaaagaccgaagttatacggccaaatactgtttttacgaccccagttaaccatgtcattgagcttgcccataaacacgtttttgttaacttcttgctccagagggtcggttacgatctcctgcttttgcagggggtaacggtcgttctcaccgttgggatctatgcgggtgagcgtataatccatcttaatgcctcgcggttagcgttgacgattagcgatactgttcgtttccgggttcatacgctcgcggcgactacgcgcgggcgtccagtccagcgcgccaatacgcaccagataaaccagacctgccagtaacacaaaaataaaaattgcagcttccacaaagcctacccagccgctttcgcggatagaggtactccatgcgaacagatacagcgcttcaacgtcgaagataacgaagaacatggccaccagataaaacttggcggacaggcgtaagcgggcggagccgacgctgtcgataccggattcaaacggcacgtttttgctcctcgcgcgtgcgcgaccgcctaaaaaccaaccgcctaccagcatcaggcaacacaggccaatggcaacgataagaaagatagcgaatgcccagtgatgagcgatgacttcagtggatgtactcatactcattgcttactcatcaaaagtagcgccagattcactgctcttcacggcagatggacgccacatcgattcatggggaggaataaaaaaaaccttacaatcactgtagaaattcttttatacagctaattgatgtggttttttactcctttctataaccttttgtcaactttaacaaaagtttcttcacattagtttacataatatcaacaccattagcatttaatgccctttcaccccagatccttgacgactccaggataattagatgttgttgaatcgtgtccgttgtgaagcaatggaaaaaatacgggtctattttgacaggaatttgtgtcgattcctccccccaaaagagagtattttcttgatctgtgacacgcttttgtcattccataacaaaaacgcagcaacaaatttacgtattttttaacatcattgtagcaggtgatttttttcaggcgattatttgtgcgttcgggacgtgaatctctggtggttgaaaaatgaacagttttgtacgttctgcactatgcgatgaaggatttttactaaaaaaaagccgctggggtttaaaacacccccagcggctcgttttttacactattgtctcaggaattatctatcgtccgtcgattactcgatatccctttcaatcaacaaactatcatccccttccggagcagacattgggctgtattgccacggattatggtagctctccatcgcctgatagatcacctgggccagctcattattactggacggatcatagcacagcaaatattcggtatcaggtagcggcggtaagccatctactccactcagcacacgcaggtccgggctcatcatctcaaccggccttgccgtcacgccaagaccggctttcactgccgcacgaacggccggaagcgtgctggcgacataagccagtcgccatggaatatctgctttattaagcgtcgccagcaccatatcgcgaaacgggctaggatcatccagcaatacaagagggatcggctcgcctttttgcaatatgtattccgctgcgcagtaccagtgtgttgggctggtacgcaggttcaatgccttaaacgcactaggacgatgggtggttaccatcaaatccacttcctgggattccagcatttctgccatataggcattacgtttaacgcggacatccagcgctaatttcggataaacgctactcacgcgatttaacaggaaaggtaagatcgtatcggcagattcatcactagcaccgatagttaatacgccctgaagattactgaacattaaactactgcaggcctcatcattaaaacgcaggattttcctggcgtaaccaagaagttgaatgccatgttcagttaacagtttgttgcgaccgtgacgagcgaacagttctttcccaacgagttgttccagacgctgcatttgctgacttacggcggactgagtacgacacacagcggcagctgcggcagcaaaagtgttcagatcggcaacagcaacaaatgttctcagcagatcgaggtcgaggttaattatcggacgatttgcacttatcatatattatcacttactggcggctcatactgagctggttaatgctgtgcacacacaaacaagcaattccatttgtaatgtgcctccctggcagtttcatccggaacccggacgaaagtaaaaatgcatatgagttgcactaaaaaagcgactcacattgttccgttataatgcctgaagtagatcacagaatatatcttcagggatcgcatatctattaagttactcactcttttctatttatgacatgcgcgtgtttgtataaatgtaaatgtgagtccttgttccactctcgtgcagcatcgctggtcatacgcgaacacgtaccaacagcaatggtgaggcggcatcaagagcagggatccgtcatttatccgagcattttaccccaaaaaccttttatttataagggtcattgcgaattatctgatgcaaagttatgttatgttaggcaaagtaatcttctattattaataagcacatcaaaacctttttgaatattaaataataattaattagcatcatcctcattcattaattccgcttaacaatagtttcacaccttgcccccattgcgacacctcggaaatcatcacgcagttaaactctccgtaatgaggaaatatcatcatcgcgtttcattagtgaattcttaaatgaggcattttcacacaattatcttacagataaaaaaaccagacttacaattaagaatcagaacaattcactatataacattgcatgtaaagcatatacacctcattattttgtcattattaagttattaacagcacaatcgagccttcccctctggcaaaatcttattctgcagaccttcaaaacaccgtcctgggggagtacattgttctaagctgacttccacggcagggagtggcgataacagcaaaaaaggtcaagattcatgtcccccattgaaaaatccagcaaattagagaatgtctgttatgacatccgtggtccggtgctgaaagaagcaaaacgcctggaagaagaaggtaacaaggtactgaaactgaacatcggcaacccagccccgttcggttttgacgcgccagatgaaatcctcgttgacgtgatacgcaacctgcctaccgctcaagggtattgcgattccaaaggtctttactccgcgcgtaaagccatcatgcagcactaccaggctcgtggcatgcgtgatgttaccgtggaagatatttacatcggcaatggtgtaagcgagcttatcgttcaggcaatgcaggcattgctgaacagcggggacgaaatgttggttcctgcaccagattacccactctggaccgcggcggttagcctttccagcggtaaagcggtgcattatctttgcgatgaatcctctgactggttcccggacctcgatgatattcgcgctaaaattacgcctcgtacgcgtgggatcgttattatcaacccaaataacccaaccggcgcggtatattccaaagagcttttaatggagattgtggagattgcacgtcagcataatctcattatcttcgccgatgaaatttatgacaaaattctctacgacgacgctgagcatcacagtattgcgccgctggcacctgacctgctgaccattacctttaacggactgagcaaaacgtaccgcgttgcaggcttccgtcaggggtggatggtgttgaacgggccgaaaaaacacgccaaaggctacatcgaaggtctggaaatgctggctagtatgcgcctgtgtgctaacgttcctgcgcaacacgccattcagaccgcgctaggtggttatcagagcatcagtgaatttattacccctggcggtcgtctttatgagcagcgtaaccgcgcgtgggaactgatcaacgatattccgggcgtttcctgcgtgaaacctcgtggtgcgctgtatatgttcccgaaaatcgacgccaaacgctttaacattcacgacgatcagaaaatggtgttggatttcctgttgcaggaaaaagttctgttggtgcaagggacggcattcaactggccgtggccggatcacttccgcattgtcacgctaccgcgtgtcgatgatatcgagctgtctttgagcaagttcgcgcgtttcctttctggttatcatcagctgtaatcttaatttcactgccggagattgcatccggcagcgttatcccgccacaatgacctgatgatgtcatcatacgtaaggtcactatgaaacagagccatttttttgcccatctctcccgcctgaaactcattaaccgctggccgctcatgcgcaacgtgcggacggaaaatgtgtccgaacacagtttgcaggtagcgatggtcgcccatgcgctggcagctatcaaaaatcgaaaatttggcggtaatgtcaacgccgaacgtatcgctttactggcgatgtaccacgatgccagtgaagtgctcaccggcgatctccctactccggtgaaatacttcaatagccaaatcgctcaggagtacaaggctattgaaaaaatcgctcagcaaaaactggtcgatatggttccggaagagctgcgggatatctttgcgccgttaattgacgagcatgcatatagcgatgaagaaaaaagcctggtgaaacaggcagatgcactgtgtgcatatctgaaatgtctggaagaactcgcggccggaaataatgaattcttgctggcaaaaacgcgactggaagcgacgcttgaagcgcgtcgcagccaggagatggactacttcatggaaatatttgttcccagcttccatcttagcctcgatgagattagccaggatagtccgctgtaagcagccggagtctgcgtcgcatcaggcaataagcgccggatgcgacatcaggctcttgtcaaaacggaaacagcatcgggatcatcaccacacaaaccgccatcacgataatggtgaacggtacccccaacttcacaaagtcactgaagctgtaatttcccggacctaaaaccagtgtgttaacaggactagaaaccggtgtcataaaggcggcggatgctgccatcgccacgaccatcgcgaatggataagggctcacccccatcgttttggcagcagccagcgcaatcggagccatcaacaccgccgtcgcggtattagagataaatagcccaataaccgcgctcaagacaaacaaacaccccagcatcatatgtggcccgtaaccaccgccaatgtccatcagccctttcaccgccagcgcgacacctcccgttttctgtaatgccacagcaaacggcatcatcccaacgatcaaaataatgctcggccagtgaatggatttataggcgctttcagcatctatacagcggaatttccccatcagcaggcaggcgatgatagcggcaacaggattaggaatttcatctgtcagcattaacgccaccattagcaccagacagaaaatggcatggggtgcctggctgtgcgcgggacttgcttcactcacctcttccggtaagttcagcgctacgaagtcgcggccctgtttggccagcataccgatcagtttccagttacccacaaccaggatgatatcgcccagcagcagaggctcatccgccaggctaccttccagcgccacgccattgcgctttagccccaccacattcagtccgtagcgggtacgaaaaccaatttcgcgcacgcttttaccaatcagttcactctcaggaattaaactaatctctgccatgcccacatcaagggcctggtcagaaaaatactcgccgcgcagtaccatcggctccagcaattgctcactacaaaattgccggagatcgacatcagccgcagacatatcaataagcaaaacgtcacgcgcgcgaaattcagaaaccccattaacgttcacgataacgcgacgaaaacgccgccagcgttcaacaccgatgacgttagcgccataacgctcacgtaatttgagatcatccagccgttgaccaatcattgggcttccggggcgaatagccagacgtcgcgcacgcccggtcagtcgatattcacggataagatcgcgaaaggttcgacgcgtccagccttcgcgctgcggggtctgggtatcccctttcagcatgaaacgcatcactaacatatacaaaatacccagcaccagcacgaccaggccaataggtgttacgctaaagaaactgaagccgtgatagccttcacgcagcaattcactgttgactaccaggttcggcggcgtcgccaccagcgtcatcatgccgctaatcagcccggcaaaacttaacggcatcatcagacgactcgggctcgtttgcatacgcatggcaacgcttaacaccacgggaataaagatagcgacaacgccggtactactcataaacgcgccaagccccgcgacggtcagcatcaacaaaaccaacattttgatttcactattgcccgcaactttgaccagccatgttcccattacggtggcaacaccggtacggaccaaaccatcgccaataataaacaaggcggcaatcaggacaacgttaggatcagaaaagccggaaaatacttctgggactgtcagcgttccgcttaatgcaaacgcgacaataacaaacaaagcgaccgcatccatacgcactctgcccgtcgcaaacaagacgatggcaacggccagtaaactaagaacccaaatcaattcaccgttcacaacttatccttgttaattgagggggatgacttgattctgccataaaaaagccccgacgagacggggctaaatcatgatcaggtgtttcactgaataataacatcgccatttggctgtttggtcacagtaatttgctccagactgtggaggaccaaatcgacctcattcaggcgcggggtatctgccggagcgttaaccgcaatgacatgacaacccgccgccaggccagaaagcacgccagcgggagcatcttccaccaccacacactcctgcggcgcaagccccagcagctgcgcgcctaacagatacgcatcaggttctggttttccgcgcttcactcgctcagcggttacaaacacctctggtgcgggaagcccagctattttatggcgcgctcgcgctaccggcatggagccagaagtcacaatggcccacggaatacctgctttattcaaatgactgagtaaggcgattgcccccggaagcgcggtaataccttcggtttccgtggcctcgatgtgctccagacgcgtaaactcggcggcaatatcagcctcggatttgcccgccataaaatggcgcagagaggtgatcgcctgtttaccgtgaatgaaagccagcacctcttccggcgctaacccatgacgtctggcccagttgctccacgcccgttctaccgcaggcagggaatccaccagcgttccatcaagatcaaacagaaaacctttgcaccgcacgcgggcctcctcaggcattgataatttgattaatttcgttggcgctcaaatggtactgacgcgggcaggcatgccacacattaagcatgcgctgatatttttcccacattggcgtctgggcgttaaaaccgtgagttccggcgtcaaaatgggtatagcgcccttccacattaaccataaagcggacataaccgaggtaacgtgcttcagtggcggcgtcaaagccgaggaaggtgacacgacgttcatcgatggattgctggtcctgcaaattagaccaggaaacatgcaacgcatgatacatctccataatgtcgatgatagtgcggcaggtttcttctttcagctcgccaaactcgcgatccaattcacgcatctgtaatccgtaaccacgctcaataattgtttgcaggcgacggtaacgttcagcatttgccggatcgagcatagtcatcatcttgtactgattagacaaaataagacgttgcgcgttggtcatttccattgttgactcctgtatcactctactacggtgaaaaaaaagaaggctgagtatgccttcttttatatgcgtaatcaggggtcaattacaaatcatcaaggaaagttttatccagttgtttgaaggcgcgcttaagcgtgtcagctaatgcctggtaatcaggcttgccttcaacgggtgccaacacctgtccagactcctgcaatttaccgcgaacttcataaaaccagttaaggattgcagggggtaatggcgtgacagaacgcttgcccagccaccacaatccctgcatgggtaaacttaaggcgaacagggcagtggcaactgccggcccaagctgaccgcccagggcaatctgccagcagagagtaaatacggcgatcggcggcataaaacggatcgcataacgcgtcatcttgataacgcgattttcgacaaagaccggggcaaggcgtttttccagcggccacgtcttactgtaatgctgtccccggcgaaacaagctaaaaaaattaacagaacgattatccggcgtactcatgcttcacctcaacttcacatataaagattcaaaaatttgtgcaaattcacaactcagcgggacaacgttcaaaacattttgtcttccatacccactatcaggtatcctttagcagcctgaaggcctaagtagtacatattcattgagtcgtcaaattcatatacattatgccattggctgaaaattacgcaaaatggcatagactcaagatatttcttccatcatgcaaaaaaaatttgcagtgcatgatgttaatcataaatgtcggtgtcatcatgcgctacgctctatggctccctgacgtttttttagccacgtatcaattataggtacttccatgagcagtaagttagtactggttctgaactgcggtagttctagtctgaaatttgccatcatcgatgcagtaaatggtgaagagtacctttctggtttagccgaatgtttccacctgcccgaagcacgtatcaaatggaaaatggacggcaataaacaggaagcggctttaggtgcaggcgccgctcacagcgaagcgctcaactttatcgttaatactattctggcacaaaaaccagaactgtctgcgcagctgactgctatcggtcaccgtatcgtacacggcggcgaaaagtataccagctccgtagtgatcgatgagtctgttattcagggtatcaaagatgcagcttcttttgcaccgctgcacaacccggctcacctgatcggtatcgaagaagctctgaaatctttcccacagctgaaagacaaaaacgttgctgtatttgacaccgcgttccaccagactatgccggaagagtcttacctctacgccctgccttacaacctgtacaaagagcacggcatccgtcgttacggcgcgcacggcaccagccacttctatgtaacccaggaagcggcaaaaatgctgaacaaaccggtagaagaactgaacatcatcacctgccacctgggcaacggtggttccgtttctgctatccgcaacggtaaatgcgttgacacctctatgggcctgaccccgctggaaggtctggtcatgggtacccgttctggtgatatcgatccggcgatcatcttccacctgcacgacaccctgggcatgagcgttgacgcaatcaacaaactgctgaccaaagagtctggcctgctgggtctgaccgaagtgaccagcgactgccgctatgttgaagacaactacgcgacgaaagaagacgcgaagcgcgcaatggacgtttactgccaccgcctggcgaaatacatcggtgcctacactgcgctgatggatggtcgtctggacgctgttgtattcactggtggtatcggtgaaaatgccgcaatggttcgtgaactgtctctgggcaaactgggcgtgctgggctttgaagttgatcatgaacgcaacctggctgcacgtttcggcaaatctggtttcatcaacaaagaaggtacccgtcctgcggtggttatcccaaccaacgaagaactggttatcgcgcaagacgcgagccgcctgactgcctgatttcacaccgccagctcagctggcggtgctgttttgtaacccgccaaatcggcggtaacgaaagaggataaaccgtgtcccgtattattatgctgatccctaccggaaccagcgtcggtctgaccagcgtcagccttggcgtgatccgtgcaatggaacgcaaaggcgttcgtctgagcgttttcaaacctatcgctcagccgcgtaccggtggcgatgcgcccgatcagactacgactatcgtgcgtgcgaactcttccaccacgacggccgctgaaccgctgaaaatgagctacgttgaaggtctgctttccagcaatcagaaagatgtgctgatggaagagatcgtcgcaaactaccacgctaacaccaaagacgctgaagtcgttctggttgaaggtctggtcccgacacgtaagcaccagtttgcccagtctctgaactacgaaatcgctaaaacgctgaatgcggaaatcgtcttcgttatgtctcagggcactgacaccccggaacagctgaaagagcgtatcgaactgacccgcaacagcttcggcggtgccaaaaacaccaacatcaccggcgttatcgttaacaaactgaacgcaccggttgatgaacagggtcgtactcgcccggatctgtccgagattttcgacgactcttccaaagctaaagtaaacaatgttgatccggcgaagctgcaagaatccagcccgctgccggttctcggcgctgtgccgtggagctttgacctgatcgcgactcgtgcgatcgatatggctcgccacctgaatgcgaccatcatcaacgaaggcgacatcaatactcgccgcgttaaatccgtcactttctgcgcacgcagcattccgcacatgctggagcacttccgtgccggttctctgctggtgacttccgcagaccgtcctgacgtgctggtggccgcttgcctggcagccatgaacggcgtagaaatcggtgccctgctgctgactggcggttacgaaatggacgcgcgcatttctaaactgtgcgaacgtgctttcgctaccggcctgccggtatttatggtgaacaccaacacctggcagacctctctgagcctgcagagcttcaacctggaagttccggttgacgatcacgaacgtatcgagaaagttcaggaatacgttgctaactacatcaacgctgactggatcgaatctctgactgccacttctgagcgcagccgtcgtctgtctccgcctgcgttccgttatcagctgactgaacttgcgcgcaaagcgggcaaacgtatcgtactgccggaaggtgacgaaccgcgtaccgttaaagcagccgctatctgtgctgaacgtggtatcgcaacttgcgtactgctgggtaatccggcagagatcaaccgtgttgcagcgtctcagggtgtagaactgggtgcagggattgaaatcgttgatccagaagtggttcgcgaaagctatgttggtcgtctggtcgaactgcgtaagaacaaaggcatgaccgaaaccgttgcccgcgaacagctggaagacaacgtggtgctcggtacgctgatgctggaacaggatgaagttgatggtctggtttccggtgctgttcacactaccgcaaacaccatccgtccgccgctgcagctgatcaaaactgcaccgggcagctccctggtatcttccgtgttcttcatgctgctgccggaacaggtttacgtttacggtgactgtgcgatcaacccggatccgaccgctgaacagctggcagaaatcgcgattcagtccgctgattccgctgcggccttcggtatcgaaccgcgcgttgctatgctctcctactccaccggtacttctggtgcaggtagcgacgtagaaaaagttcgcgaagcaactcgtctggcgcaggaaaaacgtcctgacctgatgatcgacggtccgctgcagtacgacgctgcggtaatggctgacgttgcgaaatccaaagcgccgaactctccggttgcaggtcgcgctaccgtgttcatcttcccggatctgaacaccggtaacaccacctacaaagcggtacagcgttctgccgacctgatctccatcgggccgatgctgcagggtatgcgcaagccggttaacgacctgtcccgtggcgcactggttgacgatatcgtctacaccatcgcgctgactgcgattcagtctgcacagcagcagtaatctcgtcatcatccgcagctttgcgctgcggatatctgaaccggaaataatcactatttccggttttttattctcttaatttgcattaatcctttctgattatcttgcttaactgcgctgcatcaatgaattgcgccatcccactttgcatacttaccactttgttttgtgcaagggaatatttgcgctatgtccgcaatcactgaatccaaaccaacaagaagatgggcaatgcccgatacgttggtgattatcttttttgttgctattttaaccagccttgccacctgggtagttccggtggggatgtttgacagtcaggaagtgcagtatcaggttgatggtcaaacaaaaacacgcaaagtcgtagatccacacagttttcgcattctgactaacgaagcaggcgaacctgagtatcaccgcgtacagctgttcacgacgggcgatgaacgcccgggcctgatgaacttcccgtttgaaggattaaccagtggaagcaaatacgggacagccgttggcatcatcatgtttatgctggtgattggcggcgcgtttggcattgtgatgcgtacaggaaccattgataacggtatcctggcgcttatt
